(19) United States
(12) Patent Application Publication
(10) Pub. No.: US 2014/0234854 A1
(43) Pub. Date: Aug. 21, 2014

(54) METHOD FOR EVALUATION OF PRESENCE OF OR RISK OF COLON TUMORS

(71) Applicant: Applied Proteomics, Inc., San Diego, CA (US)

(72) Inventors: John Blume, Bellingham, WA (US); Ryan Benz, Huntington Beach, CA (US); Lisa Croner, San Diego, CA (US); Roslyn Dillon, Cardiff, CA (US); Arlo Z. Randall, San Clemente, CA (US); Jeffrey Jones, Glendale, CA (US); Heather Skor, San Diego, CA (US); Tom Stockfisch, Escondido, CA (US); Bruce Wilcox, Harrisonburg, VA (US); Daniel Ruderman, Los Angeles, CA (US)

(73) Assignee: Applied Proteomics, Inc., San Diego, CA (US)

(21) Appl. No.: 14/094,594

(22) Filed: Dec. 2, 2013

Related U.S. Application Data
(60) Provisional application No. 61/732,024, filed on Nov. 30, 2012.
(60) Provisional application No. 61/772,979, filed on Mar. 5, 2013.

(51) Int. Cl. G01N 33/574

(52) U.S. Cl. CPC G01N 33/57419
USPC 435/7.1

(57) ABSTRACT

The disclosed methods are used to predict or assess colon tumor status in a patient. They can be used to determine nature of tumor, recurrence, or patient response to treatments. Some embodiments of the methods include generating a report for clinical management. The methodology provided herein is intended to detect technical variations and to allow for data normalization and enhance signal detection and build predictive proteins profiles of disease status and response.

### CROSS-REFERENCE

[0001] This application claims priority under 35 U.S.C. §119(e) to U.S. Provisional Application Nos. 61/732,024, filed on Nov. 30, 2012, and 61/772,979 filed on Mar. 5, 2013, all of which are incorporated herein by reference in their entirety.

### SEQUENCE LISTING

[0002] The instant application contains a Sequence Listing which has been submitted electronically in ASCII format and is hereby incorporated by reference in its entirety. Said ASCII copy, created on Nov. 27, 2013, is named 36765-703.201 SL.txt and is 783,936 bytes in size.

### BACKGROUND OF THE DISCLOSURE

[0003] As is known in the field, the information content of the genome is carried as DNA. The first step of gene expression is the transcription of DNA into mRNA. The second step in gene expression is the synthesis of polypeptide from mRNA, such that every three nucleotides of mRNA encodes for one amino acid residue that will make up the polypeptide. After translation, polypeptides are often post-translationally modified by the addition of different chemical groups such as carbohydrate, lipid and phosphate groups, as well as through the proteolytic cleavage of specific peptide bonds. These chemical modifications allow the polypeptide to assume a unique three-dimensional conformation giving rise to the mature protein. While these post-translational modifications are not directly coded for from the mRNA template, they are pivotal attributes of the protein that act to modulate its function by changing overall conformation and available interaction sites. Moreover, protein levels within a cell can reflect whether an individual is in a healthy or disease state. Consequently, proteins are a very valuable source of biomarkers of disease status, early onset of disease, and risk of disease.

[0004] Both mRNA and protein are continually being synthesized and degraded by separate pathways. In addition, there are multiple levels of regulation on the synthesis and degradation pathways. Given this, it is not surprising that there is no simple correlation between the abundance of mRNA species and the actual amounts of proteins for which they code (Anderson and Seilhamer, Electrophoresis 18: 533-537; Gygi et al., Mol. Cell. Biol. 19: 1720-1730, 1999). Thus, while mRNA levels are often extrapolated to indicate the levels of expressed proteins, final levels of protein are not necessarily obtainable by measuring mRNA levels (Patton, J. Chromatogr. 722: 203-223, 1999); Patton et al., J. Biol. Chem. 270: 21404-21410 (1995).

[0005] Thus, methods of determining the protein profile of biological samples are needed.

### SUMMARY OF THE DISCLOSURE

[0006] Methods are disclosed for detecting the presence of an adenoma, cancer, or polyp of the colon in a subject with a sensitivity of greater than 70% or a selectivity of greater than 70%. In various embodiments, said methods comprise the steps of: (a) obtaining a blood sample from a subject; (b) cleaving proteins in said blood sample to provide a sample comprising peptides; (c) analyzing said sample for the presence of at least ten peptides; (d) comparing the results of analyzing said sample with control reference values to determine a positive or negative score for the presence of an adenoma or polyp of the colon with a sensitivity of greater than 70% or a selectivity of greater than 70%. Also disclosed are methods of treating an adenoma, cancer, or polyp of the colon in a subject comprising (a) performing the method of detecting as described herein to yield a subject with a positive score for the presence of an adenoma, cancer, or polyp; and (b) performing a procedure for the removal of adenoma or polyp tissue in said subject.

[0007] Additionally, methods are disclosed for detecting the presence or absence of an adenoma or polyp of the colon in a subject, wherein said subject has no symptoms or family history of adenoma or polyps of the colon, said method comprising the steps of: (a) obtaining a biological sample from said subject; (b) performing an analysis of the biological sample for the presence and amount of one or more proteins and/or peptides; (c) comparing the presence and amount of one or more proteins and/or peptides from said biological sample to a control reference value; and (d) correlating the presence and amount of one or more proteins and/or peptides with the subject's adenoma, cancer, or polyp status.

[0008] Additionally, methods are disclosed for detecting the presence or absence of an adenoma, cancer, or polyp of the colon in a subject in whom a colonoscopy yielded a negative result comprising the steps of: (a) obtaining a biological sample from a subject with a negative diagnosis of adenoma, cancer, or polyps based on colonoscopy; (b) performing an analysis of the biological sample for the presence and amount of one or more proteins and/or peptides; (c) comparing the presence and amount of one or more proteins and/or peptides from said biological sample to a control reference value; and (d) correlating the presence and amount of one or more proteins and/or peptides with the subject's adenoma, cancer, or polyp status.

[0009] Methods are disclosed for detecting recurrence or absence of an adenoma, cancer, or polyp of the colon in a subject previously treated for adenoma, cancer, or polyps of the colon comprising the steps of: (a) obtaining a biological sample from a subject previously treated for adenoma, cancer, or polyps of the colon; (b) performing an analysis of the biological sample for the presence and amount of one or more proteins and/or peptides; (c) comparing the presence and amount of one or more proteins and/or peptides from said biological sample to a control reference value; and (d) correlating the presence and amount of one or more proteins and/or peptides with the subject's adenoma, cancer, or polyp status.

[0010] In addition, methods are disclosed for protein and/or peptide detection for diagnostic application comprising the steps of: (a) obtaining a biological sample from a subject; (b) performing an analysis of the biological sample for the presence and amount of one or more proteins and/or peptides; (c) comparing the presence and amount of one or more proteins and/or peptides from said biological sample to a control reference value; and (d) correlating the presence and amount of one or more proteins and/or peptides with a diagnosis for said subject; wherein said analysis detects the presence and amount of one or more proteins, peptides, or classifiers as disclosed herein.

[0011] Additional, a kit is disclosed for performing a method as described herein, where the kit contains: (a) a container for collecting a sample from a subject; (b) means for detecting one or more proteins or peptides, or means for transferring said container to a test facility; and (c) written instructions.

[0012] Lastly, the present disclosure provide for a method for the diagnosis, prediction, prognosis and/or monitoring a colon disease. Methods are also disclosed for the diagnosis, prediction, prognosis and/or monitoring a colon disease or colorectal cancer in a subject comprising: measuring at least one biomarker selected from the group ACTB, ACTH, ANGT, SAHH, ALDR, AKT1, ALBU, AL1A1, AL1B1, ALDOA, AMY2B, ANXA1, ANXA3, ANXA4, ANXA5, APC, APOA1, APOC1, APOH, GDIR1, ATPB, BANK1, MIC1, CA195, CO3, CO9, CAH1, CAH2, CALR, CAPG, CD24, CD63, CDD, CEAM3, CEAM5, CEAM6, CGHB, CH3L1, KCRB, CLC4D, CLUS, CNN1, COR1C, CRP, CSF1, CTNB1, CATD, CATS, CATZ, CUL1, SYDC, DEFT, DEF3, DESM, DPP4, DPYL2, DYHC1, ECH1, EF2, IF4A3, ENOA, EZRI, NIBL2, SEPR, FBX4, FIBB, FIBG, FHL1, FLNA, FRMD3, FRIH, FRIL, FUCO, GBRA1, G3P, SYG, GDF15, GELS, GSTP1, HABP2, HGF, 1A68, HMGB1, ROA1, ROA2, HNRPF, HPT, HS90B, ENPL, GRP75, HSPB1, CH60, SIAL, IFT74, IGF1, IGHA2, IL2RB, IL8, IL9, RASK, K1C19, K2C8, LAMA2, LEG3, LMNB1, MARE1, MCM4, MIF, MMP7, MMP9, CD20, MYL6, MYL9, NDKA, NNMT, A1AG1, PCKGM, PDIA3, PDIA6, PDXK, PEBP1, PIPNA, KPYM, UROK, IPYR, PRDX1, KPCD1, PRL, TMG4, PSME3, PTEN, FAK1, FAK2, RBX1, REG4, RHOA, RHOB, RHOC, RSSA, RRBP1, S10AB, S10AC, S10A8, S109, SAA1, SAA2, SEGN, SDCG3, DHSA, SBP1, SELPL, SEP9, A1AT, AACT, ILEU, SPB6, SF3B3, SKP1, ADT2, ISK1, SPON2, OSTP, SRC, STK11, HNRPQ, TAL1, TRFE, TSP1, TIMP1, TKT, TSG6, TR10B, TNF6B, P53, TPM2, TCTP, TRAP1, THTR, TBB1, UGDH, UGPA, VEGFA, VIL1, VIME, VNN1, 1433Z, CCR5, FUCO and combinations thereof in a biological sample from the subject.

[0013] Methods are also disclosed for the diagnosis, prediction, prognosis and/or monitoring a colon disease or colorectal cancer in a subject comprising: measuring at least one biomarker selected from the group SPB6, FRIL, P53, 1A68, ENOA, TKT, and combinations thereof in a biological sample from the subject.

[0014] Methods are disclosed for the diagnosis, prediction, prognosis and/or monitoring a colon disease or colorectal cancer in a subject comprising: measuring at least one biomarker selected from the group SPB6, FRIL, P53, 1A68, ENOA, TKT, TSG6, TPM2, ADT2, FHL1, CCR5, CEAM5, SPON2, 1A68, RBX1, COR1C, VIME, PSME3, and combinations thereof in a biological sample from the subject.

[0015] Methods are disclosed for the diagnosis, prediction, prognosis and/or monitoring a colon disease or colorectal cancer in a subject comprising: measuring at least one biomarker selected from the group SPB6, FRIL, P53, 1A68, ENOA, TKT, TSG6, TPM2, ADT2, FHL1, CCR5, CEAM5, SPON2, 1A68, RBX1, COR1C, VIME, PSME3, MIC1, STK11, IPYR, SBP1, PEBP1, CATD, HPT, ANXA5, ALDOA, LAMA2, CATZ, ACTB, AACT, and combinations thereof in a biological sample from the subject.

### INCORPORATION BY REFERENCE

[0016] All publications, patents, and patent applications mentioned in this specification are herein incorporated by reference to the same extent as if each individual publication, patent, or patent application was specifically and individually indicated to be incorporated by reference.

### BRIEF DESCRIPTION OF THE DRAWINGS

[0017] The novel features of the disclosure are set forth with particularity in the appended claims. A better understanding of the features and advantages of the present disclosure will be obtained by reference to the following detailed description that sets forth illustrative embodiments, in which the principles of the disclosure are utilized, and the accompanying drawings of which:

[0018] FIG. 1A shows a graph illustrating the predictive performance of a biomarker profile for colon polyps according to Example 3A.

[0019] FIG. 1B shows a graph illustrating the predictive performance of a biomarker profile for colon polyps according to Example 3B, with the Y-axis as the average true positive rate, and the X-axis as the false positive rate.

[0020] FIG. 2A shows a validation of the testing set performance for Example 3A.

[0021] FIG. 2B shows a validation of the testing set performance for Example 3B, with the Y-axis as the average true positive rate, and the X-axis as the false positive rate.

[0022] FIG. 3 shows a pareto plot of the feature-frequency table for Example 3A.

[0023] FIG. 4 shows a pareto plot of the feature-frequency table for Example 3B, with the Y-axis as the feature occurrence, and the X-axis as the feature rank.

[0024] FIG. 5 shows a graph illustrating the predictive performance of a biomarker profile for colon polyps according to Example 3A with a smaller set.

[0025] FIG. 6 shows a validation of the testing set performance for Example 3A with a smaller set.

[0026] FIG. 7 shows the masses of the 1014 features represented in the classifiers assembled in Example 3A, each present 3 or more times.

[0027] FIG. 8 shows the masses of the 206 features represented in the classifiers assembled in Example 3B.

[0028] FIG. 9 provides a table of additional biomarkers for inclusion or exclusion.

[0029] FIG. 10 shows a graph illustrating the predictive performance of a biomarker profile for CRC according to Example 4, with the Y-axis as the average true positive rate, and the X-axis as the false positive rate.

[0030] FIG. 11 shows a pareto plot of the feature-frequency table for assembled in Example 4.

[0031] FIG. 12 shows the peptide fragment transitional ions represented in the classifier predictive of CRC assembled in Example 4.

[0032] FIG. 13 illustrates an embodiment of various components of a generalized computer system 1300.

[0033] FIG. 14 is a diagram illustrating an embodiment of an architecture of a computer system that can be used in connection with embodiments of the present disclosure 1400.

[0034] FIG. 15 is a diagram illustrating an embodiment of a computer network that can be used in connection with embodiments of the present disclosure 1500.

[0035] FIG. 16 is a diagram illustrating an embodiment of architecture of a computer system that can be used in connection with embodiments of the present disclosure 1600.

### DETAILED DESCRIPTION OF THE DISCLOSURE

### I. Definitions

[0036] The term “colorectal cancer status” refers to the status of the disease in subject. Examples of types of colorectal cancer statuses include, but are not limited to, the subject's risk of cancer, including colorectal carcinoma, the presence or absence of disease (e.g., polyp or adenocarcinoma), the stage of disease in a patient (e.g., carcinoma), and the effectiveness of treatment of disease.

[0037] The term “mass spectrometer” refers to a gas phase ion spectrometer that measures a parameter that can be translated into mass-to-charge (m/z) ratios of gas phase ions. Mass spectrometers generally include an ion source and a mass analyzer. Examples of mass spectrometers are time-of-flight, magnetic sector, quadrupole filter, ion trap, ion cyclotron resonance, electrostatic sector analyzer and hybrids of these. “Mass spectrometry” refers to the use of a mass spectrometer to detect gas phase ions.

[0038] The term “tandem mass spectrometer” refers to any mass spectrometer that is capable of performing two successive stages of m/z-based discrimination or measurement of ions, including ions in an ion mixture. The phrase includes mass spectrometers having two mass analyzers that are capable of performing two successive stages of m/z-based discrimination or measurement of ions tandem-in-space. The phrase further includes mass spectrometers having a single mass analyzer that is capable of performing two successive stages of m/z-based discrimination or measurement of ions tandem-in-time. The phrase thus explicitly includes Qq-TOF mass spectrometers, ion trap mass spectrometers, ion trap-TOF mass spectrometers, TOF-TOF mass spectrometers, Fourier transform ion cyclotron resonance mass spectrometers, electrostatic sector-magnetic sector mass spectrometers, and combinations thereof.

[0039] The term “biochip” refers to a solid substrate having a generally planar surface to which an adsorbent is attached. Frequently, the surface of the biochip comprises a plurality of addressable locations, each of which location has the adsorbent bound there. Biochips can be adapted to engage a probe interface, and therefore, function as probes. Protein biochips are adapted for the capture of polypeptides and can be comprise surfaces having chromatographic or biospecific adsorbents attached thereto at addressable locations. Microarray chips are generally used for DNA and RNA gene expression detection.

[0040] The term “biomarker” refers to a polypeptide (of a particular apparent molecular weight), which is differentially present in a sample taken from subjects having human colorectal cancer as compared to a comparable sample taken from control subjects (e.g., a person with a negative diagnosis or undetectable colorectal cancer, normal or healthy subject, or, for example, from the same individual at a different time point). The term “biomarker” is used interchangeably with the term “marker”. A biomarker can be a gene, such DNA or RNA or a genetic variation of the DNA or RNA, their binding partners, splice-variants. A biomarker can be a protein or protein fragment or transitional ion of an amino acid sequence, or one or more modifications on a protein amino acid sequence. In addition, a protein biomarker can be a binding partner of a protein or protein fragment or transitional ion of an amino acid sequence.

[0041] The terms “polypeptide,” “peptide” and “protein” are used interchangeably herein to refer to a polymer of amino acid residues. A polypeptide is a single linear polymer chain of amino acids bonded together by peptide bonds between the carboxyl and amino groups of adjacent amino acid residues. Polypeptides can be modified, e.g., by the addition of carbohydrate, phosphorylation, ect.

[0042] The term “immunoassay” is an assay that uses an antibody to specifically bind an antigen (e.g., a marker). The immunoassay is characterized by the use of specific binding properties of a particular antibody to isolate, target, and/or quantify the antigen.

[0043] The term “antibody” refers to a polypeptide ligand substantially encoded by an immunoglobulin gene or immunoglobulin genes, or fragments thereof, which specifically binds and recognizes an epitope. Antibodies exist, e.g., as intact immunoglobulins or as a number of well-characterized fragments produced by digestion with various peptidases. This includes, e.g., Fab″ and F(ab)″₂ fragments. As used herein, the term “antibody” also includes antibody fragments either produced by the modification of whole antibodies or those synthesized de novo using recombinant DNA methodologies. It also includes polyclonal antibodies, monoclonal antibodies, chimeric antibodies, humanized antibodies, or single chain antibodies. “Fc” portion of an antibody refers to that portion of an immunoglobulin heavy chain that comprises one or more heavy chain constant region domains, but does not include the heavy chain variable region.

[0044] The term “tumor” refers to a solid or fluid-filled lesion that may be formed by cancerous or non-cancerous cells. The terms “mass” and “nodule” are often used synonymously with “tumor”. Tumors include malignant tumors or benign tumors. An example of a malignant tumor can be a carcinoma which is known to comprise transformed cells.

[0045] The term “polyp” refers to an abnormal growth of tissue projecting from a mucous membrane. If it is attached to the surface by a narrow elongated stalk, it is said to be pedunculated polyp. If no stalk is present, it is said to be sessile polyp. Polyps may be malignant, pre-cancerous, or benign. Polyps may be removed by various procedures, such as surgery, or for example, during colonoscopy with polypectomy.

[0046] The term “adenomatous polyps” or “adenomas” are used interchangeably herein to refer to polyps that grow on the lining of the colon and which carry an increased risk of cancer. The adenomatous polyp is considered pre-malignant; however, some are likely to develop into colon cancer. Tubular adenomas are the most common of the adenomatous polyps and they are the least likely of colon polyps to develop into colon cancer. Tubulovillous adenoma is yet another type. Villous adenomas area third type that is normally larger in size than the other two types of adenomas and they are associated with the highest morbidity and mortality rates of all polyps.

[0047] The term “binding partners” refers to pairs of molecules, typically pairs of biomolecules that exhibit specific binding. Protein-protein interactions which can occur between two or more proteins, when bound together they often to carry out their biological function. Interactions between proteins are important for the majority of biological functions. For example, signals from the exterior of a cell are mediated via ligand and receptor proteins to the inside of that cell by protein-protein interactions of the signaling molecules. For example, molecular binding partners include, without limitation, receptor and ligand, antibody and antigen, biotin and avidin, and others.

[0048] The term “control reference” refers to a known steady state molecule or a non-diseased, healthy condition that is used as relative marker in which to study the fluctuations or compare the non-steady state molecules or normal non-diseased healthy condition, or it can also be used to calibrate or normalize values. In various embodiments, a control reference value is a calculated value from a combination of factors or a combination of a range of factors, such as a combination of biomarker concentrations or a combination of ranges of concentrations.

[0049] The term “subject,” “individual” or “patient” is used interchangeably herein, which refers to a vertebrate, preferably a mammal, more preferably a human. Mammals include, but are not limited to, murines, simians, farm animals, sport animals, and pets. Specific mammals include rats, mice, cats, dogs, monkeys, and humans. Non-human mammals include all mammals other than humans. Tissues, cells and their progeny of a biological entity obtained in vitro or cultured in vitro are also encompassed.

[0050] The term “in vivo” refers to an event that takes place in a subject's body.

[0051] The term “in vitro” refers to an event that takes places outside of a subject's body. For example, an in vitro assay encompasses any assay run outside of a subject assay. In vitro assays encompass cell-based assays in which cells alive or dead are employed. In vitro assays also encompass a cell-free assay in which no intact cells are employed.

[0052] The term “measuring” means methods which include detecting the presence or absence of marker(s) in the sample, quantifying the amount of marker(s) in the sample, and/or qualifying the type of biomarker. Measuring can be accomplished by methods known in the art and those further described herein, including but not limited to mass spectrometry approaches and immunoassay approaches or any suitable methods can be used to detect and measure one or more of the markers described herein.

[0053] The term “detect” refers to identifying the presence, absence or amount of the object to be detected. Non-limiting examples include, but are not limited to, detection of a DNA molecules, proteins, peptides, protein complexes, RNA molecules or metabolites.

[0054] The term “differentially present” refers to differences in the quantity and/or the frequency of a marker present in a sample taken from subjects as compared to a control reference or a control non-diseased, healthy subject. A marker can be differentially present in terms of quantity, frequency or both.

[0055] The term “monitoring” refers to recording changes in a continuously varying parameter.

[0056] The term “diagnostic” or “diagnosis” is used interchangeably herein means identifying the presence or nature of a pathologic condition, or subtype of a pathologic condition, i.e., presence or risk of colon polyps. Diagnostic methods differ in their sensitivity and specificity. Diagnostic methods may not provide a definitive diagnosis of a condition; however, it suffices if the method provides a positive indication that aids in diagnosis.

[0057] The term “prognosis” is used herein to refer to the prediction of the likelihood of disease or diseases progression, including recurrence and therapeutic response.

[0058] The term “prediction” is used herein to refer to the likelihood that a patient will have a particular clinical outcome, whether positive or negative. The predictive methods of the present disclosure can be used clinically to make treatment decisions by choosing the most appropriate treatment modalities for any particular patient.

[0059] The term “report” refers to a printed result provided from the methods of the present to physician is inconclusive or confirmatory as necessary. The report could indicate presence of, nature of, or risk for the pathological condition. The report can also indicate what treatment is most appropriate; e.g., no action, surgery, further tests, or administering therapeutic agents.

### II. General Overview

[0060] The development of biomarker profiles for diagnostics, prognostics, and predicted drug responses for disease can be useful to the medical community.

[0061] The present disclosure provides for methods, compositions, systems, and kits that analyze a complex biological sample from an individual using various assays coupled with algorithms executed by a processor instructed by computer readable medium for determining a biomarker, which is indicative for worsening or improving in clinical status or health. Generally, the methods use various molecules from multiple levels of molecular biology, e.g., the polynucleotide (DNA or RNA), polypeptide, and metabolite levels, of the biological system to identify a biomarker or biomarker profile of a disease such as colon cancer, colon polyp, and various colorectal diseases are contemplated.

[0062] The present disclosure also provides biomarkers and systems useful for the diagnosis, prediction, prognosis, or monitoring for the presence or recovery from colon polyp or colon cancer in an individual.

[0063] The present disclosure also provides a commercial diagnostic kit that in general will include compositions used for the detection of biomarkers provided herein, instructions, and a report that indicates the diagnosis, prediction, prognosis, presence or recovery from colon polyp or colon cancer in an individual. Clinical predictions or status provided by the report can indicate a likelihood, chance or risk that a subject will develop clinically manifest colon polyp and colon cancer, for example within a certain time period or at a given age in individual not having yet clinically presented a colon polyp or carcinoma.

### III. Methods

[0064] The present disclosure provides medical diagnostic methods based on proteomic and/or genomic patterns, using data obtained by mass spectrometry. The method allows classifying the patients as to their disease stage based on their proteomic and/or genomic patterns.

[0065] Colorectal cancer, also known as colon cancer, rectal cancer, or bowel cancer, is a cancer from uncontrolled cell growth in the colon or rectum. Additionally, the present disclosure provides new biomarkers for medical diagnosis of colon polyp and colorectal cancer.

[0066] A colon polyp is benign clump of cells that forms on the lining of the large intestine or colon. Almost all polyps are initially non-malignant. However, over time some can turn into cancerous lesions. The cause of most colon polyps is not known, but they are common in adults. Since colon polyps are asymptomatic, regular screening for colon polyps is recommended. Currently, the methods used for screening for polyps are highly invasive and expensive. Thus, despite the benefit of colonoscopy screening in the prevention and reduction of colon cancer, many of the people for whom the procedure is recommended decline to undertake it, primarily due to concerns about cost, discomfort, and adverse events. This group represents tens of millions of people in the U.S. alone.

[0067] A molecular test which helps classify the likelihood that a patient has a higher risk for the presence of a colon polyp, adenoma, or a cancerous tumor such as, carcinoma may help physicians to guide patients' attitudes and actions regarding reluctance to undergo colonoscopy. Increased colonoscopy screening compliance would result in early detection of cancer or pre-cancerous adenoma and a reduction in colon cancer-related morbidity and mortality.

[0068] The present disclosure provides for a protein biomarker test which is less invasive than a colonoscopy, and that will determine an individual's protein expression fingerprint or profile. In some applications of the disclosure, a report is generated based on the predicted likelihood an individual's polyp status and/or risk of developing colon polyps or colon cancer. Thus, the present disclosure provides methods, kits, compositions, and systems that provide information for an individual's colon polyp status and/or risk of developing colon polyps, or colon cancer.

[0069] In one aspect of the disclosure, a set of protein-based classifiers (e.g. biomarker profile) have been identified by an LCMS-based procedure which enable prediction of colonoscopy procedure outcomes with respect to the presence or absence of colon polyps, adenomas or carcinomas in the patients.

[0070] In one aspect of the disclosure, an LCMS-based approach has been used to identify plasma-protein-based molecular features that can comprise one or more classifiers that discriminate patients who are more likely to have polyps, adenomas, or tumors.

[0071] In one aspect of the disclosure, classifiers are used to determine which individuals are not likely to have polyps, adenomas, or tumors, and who therefore might not need to have a colonoscopy.

[0072] In one aspect of the disclosure, classifiers are used to measure the completeness of suspicious polyp removal during colonoscopy by comparing classifier values before and after the procedure.

[0073] In one aspect of the disclosure, classifiers are used during intervals between regular screening colonoscopies to catch so-called interval disease.

[0074] In one aspect of the disclosure, classifiers are used to increase the time between successive colonoscopies in patients with an elevated risk profile. Examples of patients with an elevated risk profile can include patients with previous polypectomy or other pathology.

[0075] The disclosure provides a method of generating and analysing a blood protein fragmentation profile, in terms of the size, and sequence of particular fragments derived from intact proteins together with the position where enzymes scission occurs (e.g. trypsin digestion, ect.) along the full protein polypeptide chain is characteristic of the diseased state of the colon.

[0076] It is completed that the method, kits, compositions, and systems provided by the present disclosure may also be automated in whole or in part depending upon the application.

[0077] A. Algorithm-Based Methods

[0078] The present disclosure provides an algorithm-based diagnostic assay for predicting a clinical outcome for a patient with colon polyps or colon cancer. The expression level of one or more protein biomarkers may be used alone or arranged into functional subsets to calculate a quantitative score that can be used to predict the likelihood of a clinical outcome.

[0079] A “biomarker” or “maker” of the present disclosure can be a polypeptide of a particular apparent molecular weight, a gene, such DNA or RNA or a genetic variation of the DNA or RNA, their binding partners, splice-variants. A biomarker can be a protein or protein fragment or transitional ion of an amino acid sequence, or one or more modifications on a protein amino acid sequence. In addition, a protein biomarker can be a binding partner of a protein or protein fragment or transitional ion of an amino acid sequence.

[0080] The algorithm-based assay and associated information provided by the practice of the methods of the present disclosure facilitate optimal treatment decision-making in patients presenting with colon tumors. For example, such a clinical tool would enable physicians to identify patients who have a low likelihood of having a polyp or carcinoma and therefore would not need anti-cancer treatment, or who have a high likelihood of having an aggressive cancer and therefore would need anti-cancer treatment.

[0081] A quantitative score may be determined by the application of a specific algorithm. The algorithm used to calculate the quantitative score in the methods disclosed herein may group the expression level values of a biomarker or groups of biomarkers. The formation of a particular group of biomarkers, in addition, can facilitate the mathematical weighting of the contribution of various expression levels of biomarker or biomarker subsets (e.g. classifier) to the quantitative score. The present disclosure provides a various algorithms for calculating the quantitative scores.

[0082] B. Normalization of Data

[0083] The expression data used in the methods disclosed herein can be normalized. Normalization refers to a process to correct for example, differences in the amount of genes or protein levels assayed and variability in the quality of the template used, to remove unwanted sources of systematic variation measurements involved in the processing and detection of genes or protein expression. Other sources of systematic variation are attributable to laboratory processing conditions.

[0084] In some instances, normalization methods can be used for the normalization of laboratory processing conditions. Non-limiting examples of normalization of laboratory processing that may be used with methods of the disclosure include but are not limited to: accounting for systematic differences between the instruments, reagents, and equipment used during the data generation process, and/or the date and time or lapse of time in the data collection.

[0085] Assays can provide for normalization by incorporating the expression of certain normalizing standard genes or proteins, which do not significantly differ in expression levels under the relevant conditions, that is to say they are known to have a stabilized and consistent expression level in that particular sample type. Suitable normalization genes and proteins that can be used with the present disclosure include housekeeping genes. (See, e.g., E. Eisenberg, et al., Trends in Genetics 19(7):362-365 (2003). In some applications, the normalizing biomarkers (genes and proteins), also referred to as reference genes, known not to exhibit meaningfully different expression levels in colon polyps or cancer as compared to patients with no colon polyps. In some applications, it may be useful to add a stable isotope labeled standards which can be used and represent an entity with known properties for use in data normalization. In other applications, a standard, fixed sample can be measured with each analytical batch to account for instrument and day-to-day measurement variability.

[0086] In some applications, diagnostic, prognostic and predictive genes may be normalized relative to the mean of at least 2, 3, 4, 5, 6, 7, 8, 9, 10, 15, 20, 25, 30, 40, or 50 or more reference genes and proteins. Normalization can be based on the mean or median signal of all of the assayed biomarkers or by a global biomarker normalization approach. Those skilled in the art will recognize that normalization may be achieved in numerous ways, and the techniques described above are intended only to be exemplary.

[0087] C. Standardization of Data

[0088] The expression data used in the methods disclosed herein can be standardized. Standardization refers to a process to effectively put all the genes on a comparable scale. This is performed because some genes will exhibit more variation (a broader range of expression) than others. Standardization is performed by dividing each expression value by its standard deviation across all samples for that gene or protein.

[0089] D. Clinical Outcome Score

[0090] The use of machine learning algorithms for sub-selecting discriminating biomarkers and for building classification models can be used to determine clinical outcome scores. These algorithms include, but are not limited to, elastic networks, random forests, support vector machines, and logistic regression. These algorithms can hone in on important biomarker features and transform the underlying measurements into score or probability relating to, for example, clinical outcome, disease risk, treatment response, and/or classification of disease status.

[0091] In some applications, an increase in the quantitative score indicates an increased likelihood of a poor clinical outcome, good clinical outcome, high risk of disease, low risk of disease, complete response, partial response, stable disease, non-response, and recommended treatments for disease management. In some applications, a decrease in the quantitative score indicates an increased likelihood of a poor clinical outcome, good clinical outcome, high risk of disease, low risk of disease, complete response, partial response, stable disease, non-response, and recommended treatments for disease management.

[0092] In some applications, a similar biomarker profile from a patient to a reference profile indicates an increased likelihood of a poor clinical outcome, good clinical outcome, high risk of disease, low risk of disease, complete response, partial response, stable disease, non-response, and recommended treatments for disease management. In some applications, a dissimilar biomarker profile from a patient to a reference profile indicates an increased likelihood of a poor clinical outcome, good clinical outcome, high risk of disease, low risk of disease, complete response, partial response, stable disease, non-response, and recommended treatments for disease management.

[0093] In some applications, an increase in one or more biomarker threshold values indicates an increased likelihood of a poor clinical outcome, good clinical outcome, high risk of disease, low risk of disease, complete response, partial response, stable disease, non-response, and recommended treatments for disease management. In some applications, a decrease in one or more biomarker threshold values indicates an increased likelihood of a poor clinical outcome, good clinical outcome, high risk of disease, low risk of disease, complete response, partial response, stable disease, non-response, and recommended treatments for disease management.

[0094] In some applications, an increase in quantitative score, one or more biomarker threshold, a similar biomarker profile values or combinations thereof indicates an increased likelihood of a poor clinical outcome, good clinical outcome, high risk of disease, low risk of disease, complete response, partial response, stable disease, non-response, and recommended treatments for disease management. In some applications, an decrease in quantitative score, one or more biomarker threshold, a similar biomarker profile values or combinations thereof indicates an increased likelihood of a poor clinical outcome, good clinical outcome, high risk of disease, low risk of disease, complete response, partial response, stable disease, non-response, and recommended treatments for disease management.

[0095] E. Sample Preparation and Processing

[0096] Before analyzing the sample it may be desirable to perform one or more sample preparation operations upon the sample. Generally, these sample preparation operations may include such manipulations as extraction and isolation of intracellular material from a cell or tissue such as, the extraction of nucleic acids, protein, or other macromolecules from the samples.

[0097] Sample preparation which can be used with the methods of disclosure include but are not limited to, centrifugation, affinity chromatography, magnetic separation, immunoassay, nucleic acid assay, receptor-based assay, cytometric assay, colorimetric assay, enzymatic assay, electrophoretic assay, electrochemical assay, spectroscopic assay, chromatographic assay, microscopic assay, topographic assay, calorimetric assay, radioisotope assay, protein synthesis assay, histological assay, culture assay, and combinations thereof.

[0098] Sample preparation can further include dilution by an appropriate solvent and amount to ensure the appropriate range of concentration level is detected by a given assay.

[0099] Accessing the nucleic acids and macromolecules from the intercellular space of the sample may generally be performed by either physical, chemical methods, or a combination of both. In some applications of the methods, following the isolation of the crude extract, it will often be desirable to separate the nucleic acids, proteins, cell membrane particles, and the like. In some applications of the methods it will be desirable to keep the nucleic acids with its proteins, and cell membrane particles.

[0100] In some applications of the methods provided herein, nucleic acids and proteins can be extracted from a biological sample prior to analysis using methods of the disclosure. Extraction can be by means including, but not limited to, the use of detergent lysates, sonication, or vortexing with glass beads.

[0101] In some applications, molecules can be isolated using any technique suitable in the art including, but not limited to, techniques using gradient centrifugation (e.g., cesium chloride gradients, sucrose gradients, glucose gradients, etc.), centrifugation protocols, boiling, purification kits, and the use of liquid extraction with agent extraction methods such as methods using Trizol or DNAzol.

[0102] Samples may be prepared according to standard biological sample preparation depending on the desired detection method. For example for mass spectrometry detection, biological samples obtained from a patient may be centrifigued, filtered, processed by immunoaffinity column, separated into fractions, partially digested, and combinations thereof. Various fractions may be resuspended in appropriate carrier such as buffer or other type of loading solution for detection and analysis, including LCMS loading buffer.

[0103] F. Methods of Detection

[0104] The present disclosure provides for methods for detecting biomarkers in biological samples. Biomarkers can include but are not limited to proteins, metabolites, DNA molecules, and RNA molecules. More specifically the present disclosure is based on the discovery of protein biomarkers that are differentially expressed in subjects that have a colon polyp, or are likely to develop colon polyps. Therefore the detection of one or more of these differentially expressed biomarkers in a biological sample provides useful information whether or not a subject is at risk or suffering from colon polyps and what type of nature or state of the condition. Any suitable method can be used to detect one or more of the biomarker described herein.

[0105] Useful analyte capture agents that can be used with the present disclosure include but are not limited to antibodies, such as crude serum containing antibodies, purified antibodies, monoclonal antibodies, polyclonal antibodies, synthetic antibodies, antibody fragments (for example, Fab fragments); antibody interacting agents, such as protein A, carbohydrate binding proteins, and other interactants; protein interactants (for example avidin and its derivatives); peptides; and small chemical entities, such as enzyme substrates, cofactors, metal ions/chelates, and haptens. Antibodies may be modified or chemically treated to optimize binding to targets or solid surfaces (e.g. biochips and columns).

[0106] In one aspect of the disclosure the biomarker can be detected in a biological sample using an immunoassay. Immunoassays are assay that use an antibody that specifically bind to or recognizes an antigen (e.g. site on a protein or peptide, biomarker target). The method includes the steps of contacting the biological sample with the antibody and allowing the antibody to form a complex of with the antigen in the sample, washing the sample and detecting the antibody-antigen complex with a detection reagent. In one embodiment, antibodies that recognize the biomarkers may be commercially available. In another embodiment, an antibody that recognizes the biomarkers may be generated by known methods of antibody production.

[0107] Alternatively, the marker in the sample can be detected using an indirect assay, wherein, for example, a second, labeled antibody is used to detect bound marker-specific antibody. Exemplary detectable labels include magnetic beads (e.g., DYNABEADS™), fluorescent dyes, radiolabels, enzymes (e.g., horse radish peroxide, alkaline phosphatase and others commonly used), and calorimetric labels such as colloidal gold or colored glass or plastic beads. The marker in the sample can be detected using and/or in a competition or inhibition assay wherein, for example, a monoclonal antibody which binds to a distinct epitope of the marker is incubated simultaneously with the mixture.

[0108] The conditions to detect an antigen using an immunoassay will be dependent on the particular antibody used. Also, the incubation time will depend upon the assay format, marker, volume of solution, concentrations and the like. In general, the imunnoassays will be carried out at room temperature, although they can be conducted over a range of temperatures, such as 10.degrees. to 40 degrees Celsius depending on the antibody used.

[0109] There are various types of immunoassay known in the art that as a starting basis can be used to tailor the assay for the detection of the biomarkers of the present disclosure. Useful assays can include, for example, an enzyme immune assay (EIA) such as enzyme-linked immunosorbent assay (ELISA). There are many variants of these approaches, but those are based on a similar idea. For example, if an antigen can be bound to a solid support or surface, it can be detected by reacting it with a specific antibody and the antibody can be quantitated by reacting it with either a secondary antibody or by incorporating a label directly into the primary antibody. Alternatively, an antibody can be bound to a solid surface and the antigen added. A second antibody that recognizes a distinct epitope on the antigen can then be added and detected. This is frequently called a ‘sandwich assay’ and can frequently be used to avoid problems of high background or non-specific reactions. These types of assays are sensitive and reproducible enough to measure low concentrations of antigens in a biological sample.

[0110] Immunoassays can be used to determine presence or absence of a marker in a sample as well as the quantity of a marker in a sample. Methods for measuring the amount of, or presence of, antibody-marker complex include but are not limited to, fluorescence, luminescence, chemiluminescence, absorbance, reflectance, transmittance, birefringence or refractive index (e.g., surface plasmon resonance, ellipsometry, a resonant mirror method, a grating coupler waveguide method or interferometry). In general these regents are used with optical detection methods, such as various forms of microscopy, imaging methods and non-imaging methods. Electrochemical methods include voltametry and amperometry methods. Radio frequency methods include multipolar resonance spectroscopy.

[0111] In one aspect, the disclosure can use antibodies for the detection of the biomarkers. Antibodies can be made that specifically bind to the biomarkers of the present assay can be prepared using standard methods known in the art. For example polyclonal antibodies can be produced by injecting an antigen into a mammal, such as a mouse, rat, rabbit, goat, sheep, or horse for large quantities of antibody. Blood isolated from these animals contains polyclonal antibodies—multiple antibodies that bind to the same antigen. Alternatively polyclonal antibodies can be produced by injecting the antigen into chickens for generation of polyclonal antibodies in egg yolk. In addition, antibodies can be made that specifically recognize modified forms for the biomarkers such as a phosphorylated form of the biomarker, that is to say, they will recognize a tyrosine or a serine after phosphorylation, but not in the absence of phosphate. In this way antibodies can be used to determine the phosphorylation state of a particular biomarker.

[0112] Antibodies can be obtained commercially or produced using well-established methods. To obtain antibody that is specific for a single epitope of an antigen, antibody-secreting lymphocytes are isolated from the animal and immortalized by fusing them with a cancer cell line. The fused cells are called hybridomas, and will continually grow and secrete antibody in culture. Single hybridoma cells are isolated by dilution cloning to generate cell clones that all produce the same antibody; these antibodies are called monoclonal antibodies.

[0113] Polyclonal and monoclonal antibodies can be purified in several ways. For example, one can isolate an antibody using antigen-affinity chromatography which is couple to bacterial proteins such as Protein A, Protein G, Protein L or the recombinant fusion protein, Protein A/G followed by detection of via UV light at 280 nm absorbance of the eluate fractions to determine which fractions contain the antibody. Protein A/G binds to all subclasses of human IgG, making it useful for purifying polyclonal or monoclonal IgG antibodies whose subclasses have not been determined. In addition, it binds to IgA, IgE, IgM and (to a lesser extent) IgD. Protein A/G also binds to all subclasses of mouse IgG but does not bind mouse IgA, IgM or serum albumin. This feature, allows Protein A/G to be used for purification and detection of mouse monoclonal IgG antibodies, without interference from IgA, IgM and serum albumin.

[0114] Antibodies can be derived from different classes or isotypes of molecules such as, for example, IgA, IgA IgD, IgE, IgM and IgG. The IgA are designed for secretion in the bodily fluids while others, like the IgM are designed to be expressed on the cell surface. The antibody that is most useful in biological studies is the IgG class, a protein molecule that is made and secreted and can recognize specific antigens. The IgG is composed of two subunits including two “heavy” chains and two “light” chains. These are assembled in a symmetrical structure and each IgG has two identical antigen recognition domains. The antigen recognition domain is a combination of amino acids from both the heavy and light chains. The molecule is roughly shaped like a “Y” and the arms/tips of the molecule comprise the antigen-recognizing regions or Fab (fragment, antigen binding) region, while the stem of Fc (Fragment, crystallizable) region is not involved in recognition and is fairly constant. The constant region is identical in all antibodies of the same isotype, but differs in antibodies of different isotypes.

[0115] It is also possible to use an antibody to detect a protein after fractionation by western blotting. In one aspect, the disclosure can use western blotting for the detection of the biomarkers. Western blot (protein immunoblot) is an analytical technique used to detect specific proteins in the given sample or protein extract from a sample. It uses gel electrophoresis, SDS-PAGE to separate either native proteins by their 3-dimensional structure or it can be ran under denaturing conditions to separate proteins by their length. After separation by gel electrophoresis, the proteins are then transferred to a membrane (typically nitrocellulose or PVDF). The proteins transferred from the SDS-PAGE to a membrane can then be incubated with particular antibodies under gentle agitation, rinsed to remove non-specific binding and the protein-antibody complex bound to the blot can be detected using either a one-step or two step detection methods. The one step method includes a probe antibody which both recognizes the protein of interest and contains a detectable label, probes which are often available for known protein tags. The two-step detection method involves a secondary antibody that has a reporter enzyme or reporter bound to it. With appropriate reference controls, this approach can be used to measure the abundance of a protein.

[0116] In one aspect, the method of the disclosure can use flow cytometry. Flow cytometry is a laser based, biophysical technology that can be used for biomarker detection, quantification (cell counting) and cell isolation. This technology is routinely used in the diagnosis of health disorders, especially blood cancers. In general, flow cytometry works by suspending single cells in a stream of fluid, a beam of light (usually laser light) of a single wavelength is directed onto the stream of liquid, and the scatter light caused by the passing cell is detected by a electronic detection apparatus. Fluorescence-activated cell sorting (FACS) is a specialized type of flow cytometry that often uses the aid of florescent-labeled antibodies to detect antigens on cell of interest. This additional feature of antibody labeling use in FACS provides for simultaneous multiparametric analysis and quantification based upon the specific light scattering and fluorescent characteristics of each cell florescent-labeled cell and it provides physical separation of the population of cells of interest as well as traditional flow cytometry does.

[0117] A wide range of fluorophores can be used as labels in flow cytometry. Fluorophores are typically attached to an antibody that recognizes a target feature on or in the cell. Examples of suitable fluorescent labels include, but are not limited to: fluorescein (FITC), 5,6-carboxymethyl fluorescein, Texas red, nitrobenz-2-oxa-1,3-diazol-4-yl (NBD), and the cyanine dyes Cy3, Cy3.5, Cy5, Cy5.5 and Cy7. Other Fluorescent labels such as Alexa Fluor® dyes, DNA content dye such as DAPI, Hoechst dyes are well known in the art and all can be easily obtained from a variety of commercial sources. Each fluorophore has a characteristic peak excitation and emission wavelength, and the emission spectra often overlap. The absorption and emission maxima, respectively, for these fluors are: FITC (490 nm; 520 nm), Cy3 (554 nm; 568 nm), Cy3.5 (581 nm; 588 nm), Cy5 (652 nm: 672 nm), Cy5.5 (682 nm; 703 nm) and Cy7 (755 nm; 778 nm), thus choosing one that do not have a lot of spectra overlap allows their simultaneous detection. The fluorescent labels can be obtained from a variety of commercial sources. The maximum number of distinguishable fluorescent labels is thought to be around approximately 17 or 18 different fluorescent labels. This level of complex read-out necessitates laborious optimization to limit artifacts, as well as complex deconvolution algorithms to separate overlapping spectra. Quantum dots are sometimes used in place of traditional fluorophores because of their narrower emission peaks. Other methods that can be used for detecting include isotope labeled antibodies, such as lanthanide isotopes. However this technology ultimately destroys the cells, precluding their recovery for further analysis.

[0118] In one aspect, the method of the disclosure can use immunohistochemistry for detecting the expression levels of the biomarkers of the present disclosure. Thus, antibodies specific for each marker are used to detect expression of the claimed biomarkers in a tissue sample. The antibodies can be detected by direct labeling of the antibodies themselves, for example, with radioactive labels, fluorescent labels, hapten labels such as, biotin, or an enzyme such as horse radish peroxidase or alkaline phosphatase. Alternatively, unlabeled primary antibody is used in conjunction with a labeled secondary antibody, comprising antisera, polyclonal antisera or a monoclonal antibody specific for the primary antibody. Immunohistochemistry protocols are well known in the art and protocols and antibodies are commercially available. Alternatively, one could make an antibody to the biomarkers or modified versions of the biomarker or binding partners as disclosure herein that would be useful for determining the expression levels of in a tissue sample.

[0119] In one aspect, the method of the disclosure can use a biochip. Biochips can be used to screen a large number of macromolecules. In this technology macromolecules are attached to the surface of the biochip in an ordered array format. The grid pattern of the test regions allowed analysed by imaging software to rapidly and simultaneously quantify the individual analytes at their predetermined locations (addresses). The CCD camera is a sensitive and high-resolution sensor able to accurately detect and quantify very low levels of light on the chip.

[0120] Biochips can be designed with immobilized nucleic acid molecules, full-length proteins, antibodies, affibodies (small molecules engineered to mimic monoclonal antibodies), aptamers (nucleic acid-based ligands) or chemical compounds. A chip could be designed to detect multiple macromolecule types on one chip. For example, a chip could be designed to detect nucleic acid molecules, proteins and metabolites on one chip. The biochip is used to and designed to simultaneously analyze a panel biomarker in a single sample, producing a subjects profile for these biomarkers. The use of the biochip allows for the multiple analyses to be performed reducing the overall processing time and the amount of sample required.

[0121] Protein microarray are a particular type of biochip which can be used with the present disclosure. The chip consists of a support surface such as a glass slide, nitrocellulose membrane, bead, or microtitre plate, to which an array of capture proteins are bound in an arrayed format onto a solid surface. Protein array detection methods must give a high signal and a low background. Detection probe molecules, typically labeled with a fluorescent dye, are added to the array. Any reaction between the probe and the immobilized protein emits a fluorescent signal that is read by a laser scanner. Such protein microarrays are rapid, automated, and offer high sensitivity of protein biomarker read-outs for diagnostic tests. However, it would be immediately appreciated to those skilled in the art that they are a variety of detection methods that can be used with this technology.

[0122] There are at least three types of protein microarrays that are currently used to study the biochemical activities of proteins. For example there are analytical microarrays (also known as capture arrays), Functional protein microarrays (also known as target protein arrays) and Reverse phase protein microarray (RPA).

[0123] The present disclosure provides for the detection of the biomarkers using an analytical protein microarray. Analytical protein microarrays are constructed using a library of antibodies, aptamers or affibodies. The array is probed with a complex protein solution such as a blood, serum or a cell lysate that function by capturing protein molecules they specifically bind to. Analysis of the resulting binding reactions using various detection systems can provide information about expression levels of particular proteins in the sample as well as measurements of binding affinities and specificities. This type of protein microarray is especially useful in comparing protein expression in different samples.

[0124] In one aspect, the method of the disclosure can use functional protein microarrays are constructed by immobilising large numbers of purified full-length functional proteins or protein domains and are used to identify protein-protein, protein-DNA, protein-RNA, protein-phospholipid, and protein-small molecule interactions, to assay enzymatic activity and to detect antibodies and demonstrate their specificity. These protein microarray biochips can be used to study the biochemical activities of the entire proteome in a sample.

[0125] In one aspect, the method of the disclosure can use reverse phase protein microarray (RPA). Reverse phase protein microarray are constructed from tissue and cell lysates that are arrayed onto the microarray and probed with antibodies against the target protein of interest. These antibodies are typically detected with chemiluminescent, fluorescent or colorimetric assays. In addition to the protein in the lysate, reference control peptides are printed on the slides to allow for protein quantification. RPAs allow for the determination of the presence of altered proteins or other agents that may be the result of disease and present in a diseased cell.

[0126] The present disclosure provides for the detection of the biomarkers using mass spectroscopy (alternatively referred to as mass spectrometry). Mass spectrometry (MS) is an analytical technique that measures the mass-to-charge ratio of charged particles. It is primarily used for determining the elemental composition of a sample or molecule, and for elucidating the chemical structures of molecules, such as peptides and other chemical compounds. MS works by ionizing chemical compounds to generate charged molecules or molecule fragments and measuring their mass-to-charge ratios MS instruments typically consist of three modules (1) an ion source, which can convert gas phase sample molecules into ions (or, in the case of electrospray ionization, move ions that exist in solution into the gas phase) (2) a mass analyzer, which sorts the ions by their masses by applying electromagnetic fields and (3) detector, which measures the value of an indicator quantity and thus provides data for calculating the abundances of each ion present.

[0127] Suitable mass spectrometry methods to be used with the present disclosure include but are not limited to, one or more of electrospray ionization mass spectrometry (ESI-MS), ESI-MS/MS, ESI-MS/(MS)ₙ, matrix-assisted laser desorption ionization time-of-flight mass spectrometry (MALDI-TOF-MS), surface-enhanced laser desorption/ionization time-of-flight mass spectrometry (SELDI-TOF-MS), tandem liquid chromatography-mass spectrometry (LC-MS/MS) mass spectrometry, desorption/ionization on silicon (DIOS), secondary ion mass spectrometry (SIMS), quadrupole time-of-flight (Q-TOF), atmospheric pressure chemical ionization mass spectrometry (APCI-MS), APCI-MS/MS, APCI-(MS), atmospheric pressure photoionization mass spectrometry (APPI-MS), APPI-MS/MS, and APPI-(MS)ₙ, quadrupole mass spectrometry, Fourier transform mass spectrometry (FTMS), and ion trap mass spectrometry, where n is an integer greater than zero.

[0128] To gain insight into the underlying proteomics of a sample, LC-MS is commonly used to resolve the components of a complex mixture. LC-MS method generally involves protease digestion and denaturation (usually involving a protease, such as trypsin and a denaturant such as, urea to denature tertiary structure and iodoacetamide to cap cysteine residues) followed by LC-MS with peptide mass fingerprinting or LC-MS/MS (tandem MS) to derive sequence of individual peptides. LC-MS/MS is most commonly used for proteomic analysis of complex samples where peptide masses may overlap even with a high-resolution mass spectrometer. Samples of complex biological fluids like human serum may be first separated on an SDS-PAGE gel or HPLC-SCX and then run in LC-MS/MS allowing for the identification of over 1000 proteins.

[0129] While multiple mass spectrometric approaches can be used with the methods of the disclosure as provided herein, in some applications it may be desired to quantify proteins in biological samples from a selected subset of proteins of interest. One such MS technique that can be used with the present disclosure is Multiple Reaction Monitoring Mass Spectrometry (MRM-MS), or alternatively referred to as Selected Reaction Monitoring Mass Spectrometry (SRM-MS).

[0130] The MRM-MS technique uses a triple quadrupole (QQQ) mass spectrometer to select a positively charged ion from the peptide of interest, fragment the positively charged ion and then measure the abundance of a selected positively charged fragment ion. This measurement is commonly referred to as a transition. For example of transition obtained from the method see (TABLE 1).

[0131] In some applications the MRM-MS is coupled with High-Pressure Liquid Chromatography (HPLC) and more recently Ultra High-Pressure Liquid Chromatography (UHPLC). In other applications MRM-MS is coupled with UHPLC with a QQQ mass spectrometer to make the desired LC-MS transition measurements for all of the peptides and proteins of interest.

[0132] In some applications the utilization of a quadrupole time-of-flight (qTOF) mass spectrometer, time-of-flight time-of-flight (TOF-TOF) mass spectrometer, Orbitrap mass spectrometer, quadrupole Orbitrap mass spectrometer or any Quadrupolar Ion Trap mass spectrometer can be used to select for a positively charged ion from one or more peptides of interest. The fragmented, positively charged ions can then be measured to determine the abundance of a positively charged ion for the quantitation of the peptide or protein of interest.

[0133] In some applications the utilization of a time-of-flight (TOF), quadrupole time-of-flight (qTOF) mass spectrometer, time-of-flight time-of-flight (TOF-TOF) mass spectrometer, Orbitrap mass spectrometer or quadrupole Orbitrap mass spectrometer can be used to measure the mass and abundance of a positively charged peptide ion from the protein of interest without fragmentation for quantitation. In this application, the accuracy of the analyte mass measurement can be used as selection criteria of the assay. An isotopically labeled internal standard of a known composition and concentration can be used as part of the mass spectrometric quantitation methodology.

[0134] In some applications, time-of-flight (TOF), quadrupole time-of-flight (qTOF) mass spectrometer, time-of-flight time-of-flight (TOF-TOF) mass spectrometer, Orbitrap mass spectrometer or quadrupole Orbitrap mass spectrometer can be used to measure the mass and abundance of a protein of interest for quantitation. In this application, the accuracy of the analyte mass measurement can be used as selection criteria of the assay. Optionally this application can use proteolytic digestion of the protein prior to analysis by mass spectrometry. An isotopically labeled internal standard of a known composition and concentration can be used as part of the mass spectrometric quantitation methodology.

[0135] In some applications, various ionization techniques can be coupled to the mass spectrometers provide herein to generate the desired information. Non-limiting exemplary ionization techniques that can be used with the present disclosure include but are not limited to Matrix Assisted Laser Desorption Ionization (MALDI), Desorption Electrospray Ionization (DESI), Direct Assisted Real Time (DART), Surface Assisted Laser Desorption Ionization (SALDI), or Electrospray Ionization (ESI).

[0136] In some applications, HPLC and UHPLC can be coupled to a mass spectrometer a number of other peptide and protein separation techniques can be performed prior to mass spectrometric analysis. Some exemplary separation techniques which can be used for separation of the desired analyte (e.g., peptide or protein) from the matrix background include but are not limited to Reverse Phase Liquid Chromatography (RP-LC) of proteins or peptides, offline Liquid Chromatography (LC) prior to MALDI, 1 dimensional gel separation, 2-dimensional gel separation, Strong Cation Exchange (SCX) chromatography, Strong Anion Exchange (SAX) chromatography, Weak Cation Exchange (WCX), and Weak Anion Exchange (WAX). One or more of the above techniques can be used prior to mass spectrometric analysis.

[0137] In one aspect of the disclosure the biomarker can be detected in a biological sample using a microarray. Differential gene expression can also be identified, or confirmed using the microarray technique. Thus, the expression profile biomarkers can be measured in either fresh or fixed tissue, using microarray technology. In this method, polynucleotide sequences of interest (including cDNAs and oligonucleotides) are plated, or arrayed, on a microchip substrate. The arrayed sequences are then hybridized with specific DNA probes from cells or tissues of interest. The source of mRNA typically is total RNA isolated from a biological sample, and corresponding normal tissues or cell lines may be used to determine differential expression.

[0138] In a specific embodiment of the microarray technique, PCR amplified inserts of cDNA clones are applied to a substrate in a dense array. Preferably at least 10,000 nucleotide sequences are applied to the substrate. The microarrayed genes, immobilized on the microchip at 10,000 elements each, are suitable for hybridization under stringent conditions. Fluorescently labeled cDNA probes may be generated through incorporation of fluorescent nucleotides by reverse transcription of RNA extracted from tissues of interest. Labeled cDNA probes applied to the chip hybridize with specificity to each spot of DNA on the array. After stringent washing to remove non-specifically bound probes, the microarray chip is scanned by a device such as, confocal laser microscopy or by another detection method, such as a CCD camera. Quantitation of hybridization of each arrayed element allows for assessment of corresponding mRNA abundance. With dual color fluorescence, separately labeled cDNA probes generated from two sources of RNA are hybridized pair-wise to the array. The relative abundance of the transcripts from the two sources corresponding to each specified gene is thus determined simultaneously. Microarray analysis can be performed by commercially available equipment, following manufacturer's protocols.

[0139] In one aspect of the disclosure the biomarker can be detected in a biological sample using qRT-PCR, which can be used to compare mRNA levels in different sample populations, in normal and tumor tissues, with or without drug treatment, to characterize patterns of gene expression, to discriminate between closely related mRNAs, and to analyze RNA structure. The first step in gene expression profiling by RT-PCR is extracting RNA from a biological sample followed by the reverse transcription of the RNA template into cDNA and amplification by a PCR reaction. The reverse transcription reaction step is generally primed using specific primers, random hexamers, or oligo-dT primers, depending on the goal of expression profiling. The two commonly used reverse transcriptases are avilo myeloblastosis virus reverse transcriptase (AMV-RT) and Moloney murine leukemia virus reverse transcriptase (MLV-RT).

[0140] Although the PCR step can use a variety of thermostable DNA-dependent DNA polymerases, it typically employs the Taq DNA polymerase, which has a 5′-3′ nuclease activity but lacks a 3′-5′ proofreading endonuclease activity. Thus, TaqMan™ PCR typically utilizes the 5′-nuclease activity of Taq or Tth polymerase to hydrolyze a hybridization probe bound to its target amplicon, but any enzyme with equivalent 5′ nuclease activity can be used. Two oligonucleotide primers are used to generate an amplicon typical of a PCR reaction. A third oligonucleotide, or probe, is designed to detect nucleotide sequence located between the two PCR primers. The probe is non-extendible by Taq DNA polymerase enzyme, and is labeled with a reporter fluorescent dye and a quencher fluorescent dye. Any laser-induced emission from the reporter dye is quenched by the quenching dye when the two dyes are located close together as they are on the probe. During the amplification reaction, the Taq DNA polymerase enzyme cleaves the probe in a template-dependent manner. The resultant probe fragments disassociate in solution, and signal from the released reporter dye is free from the quenching effect of the second fluorophore. One molecule of reporter dye is liberated for each new molecule synthesized, and detection of the unquenched reporter dye provides the basis for quantitative interpretation of the data.

[0141] TaqMan™ RT-PCR can be performed using commercially available equipment, such as, for example, ABI PRISM 7700 Sequence Detection System™ (Perkin-Elmer-Applied Biosystems, Foster City, Calif., USA), or Lightcycler (Roche Molecular Biochemicals, Mannheim, Germany). In a preferred embodiment, the 5′ nuclease procedure is run on a real-time quantitative PCR device such as the ABI PRISM 7700™ Sequence Detection System™. The system consists of a thermocycler, laser, charge-coupled device (CCD), camera and computer. The system includes software for running the instrument and for analyzing the data. 5′-Nuclease assay data are initially expressed as Ct, or the threshold cycle. As discussed above, fluorescence values are recorded during every cycle and represent the amount of product amplified to that point in the amplification reaction. The point when the fluorescent signal is first recorded as statistically significant is the threshold cycle (Ct).

[0142] To minimize errors and the effect of sample-to-sample variation, RT-PCR is usually performed using an internal standard. The ideal internal standard is expressed at a constant level among different tissues, and is unaffected by the experimental treatment. RNAs most frequently used to normalize patterns of gene expression are mRNAs for the housekeeping genes glyceraldehyde-3-phosphate-dehydrogenase (GAPDH) and Beta-Actin.

[0143] A more recent variation of the RT-PCR technique is the real time quantitative PCR, which measures PCR product accumulation through a dual-labeled fluorigenic probe (i.e., TaqMan™ probe). Real time PCR is compatible both with quantitative competitive PCR, where internal competitor for each target sequence is used for normalization, and with quantitative comparative PCR using a normalization gene contained within the sample, or a housekeeping gene for RT-PCR. For further details see, e.g. Held et al., Genome Research 6:986-994 (1996).

[0144] G. Data Handling

[0145] The values from the assays described above can be calculated and stored manually. Alternatively, the above-described steps can be completely or partially performed by a computer program product. The present disclosure thus provides a computer program product including a computer readable storage medium having a computer program stored on it. The program can, when read by a computer, execute relevant calculations based on values obtained from analysis of one or more biological samples from an individual (e.g., gene or protein expression levels, normalization, standardization, thresholding, and conversion of values from assays to a clinical outcome score and/or text or graphical depiction of clinical status or stage and related information). The computer program product has stored therein a computer program for performing the calculation.

[0146] The present disclosure provides systems for executing the data collection and handling or calculating software programs described above, which system generally includes: a) a central computing environment; b) an input device, operatively connected to the computing environment, to receive patient data, wherein the patient data can include, for example, gene or protein expression level or other value obtained from an assay using a biological sample from the patient, or mass spec data or data for any of the assays provided by the present disclosure; c) an output device, connected to the computing environment, to provide information to a user (e.g., medical personnel); and d) an algorithm executed by the central computing environment (e.g., a processor), where the algorithm is executed based on the data received by the input device, and wherein the algorithm calculates an expression score, thresholding, or other functions described herein. The methods provided by the present disclosure may also be automated in whole or in part.

[0147] H. Subjects

[0148] Biological samples are collected from subjects who want to determine their likelihood of having a colon tumor or polyp. The disclosure provides for subjects that can be healthy and asymptomatic. In various embodiments, the subjects are healthy, asymptomatic and between the ages 20-50. In various embodiments, the subjects are healthy and asymptomatic and have no family history of adenoma or polyps. In various embodiments, the subjects are healthy and asymptomatic and never received a colonoscopy. The disclosure also provides for healthy subjects who are having a test as part of a routine examination, or to establish baseline levels of the biomarkers.

[0149] The disclosure provides for subjects that have no symptoms for colorectal carcinoma, no family history for colorectal carcinoma, and no recognized risk factors for colorectal carcinoma. The disclosure provides for subjects that have no symptoms for colorectal carcinoma, no family history for colorectal carcinoma, and no recognized risk factors for colorectal carcinoma other than age.

[0150] Biological samples may also be collected from subjects who have been determined to have a high risk of colorectal polyps or cancer based on their family history, a who have had previous treatment for colorectal polyps or cancer and or are in remission. Biological samples may also be collected from subjects who present with physical symptoms known to be associated with colorectal cancer, subjects identified through screening assays (e.g., fecal occult blood testing or sigmoidoscopy) or rectal digital exam or rigid or flexible colonoscopy or CT scan or other x-ray techniques. Biological samples may also be collected from subjects currently undergoing treatment to determine the effectiveness of therapy or treatment they are receiving.

[0151] I. Biological Samples

[0152] The biomarkers can be measured in different types of biological samples. The sample is preferably from a biological sample that collects and surveys the entire system. Examples of a biological sample types useful in this disclosure include one or more, but are not limited to: urine, stool, tears, whole blood, serum, plasma, blood constituent, bone marrow, tissue, cells, organs, saliva, cheek swab, lymph fluid, cerebrospinal fluid, lesion exudates and other fluids produced by the body. The biomarkers can also be extracted from a biopsy sample, frozen, fixed, paraffin embedded, or fresh.

### IV. Biomarkers and Biomarker Profiles

[0153] The biomarkers of the present disclosure allow for differentiation between a healthy individual and one suffering from or at risk for the development of colon polyps and different states of colon polyps (e.g. hyperplasic, malignant, carcinoma or tumor subtype). Specifically, the present disclosure's discovery of the biomarkers provide for the diagnostic methods, kits that aid the clinical evaluation and management of colon polyps and colon cancer.

[0154] Biomarkers which can be useful for the clinical evaluation and management of colon polyps include the full proteins, peptide fragments, nucleic acids, or transitional ions of the following proteins (UNIprotein ID numbers): SPB6_HUMAN, FRIL_HUMAN, P53_HUMAN, 1A68_HUMAN, ENOA_HUMAN, TKT_HUMAN, and combinations thereof.

[0155] Biomarkers which can be useful for the clinical evaluation and management of colon polyps include the full proteins, peptide fragments, nucleic acids, or transitional ions of the following proteins (UNIprotein ID numbers): SPB6_HUMAN, FRIL_HUMAN, P53_HUMAN, 1A68_HUMAN, ENOA_HUMAN, TKT_HUMAN, TSG6_HUMAN, TPM2_HUMAN, ADT2_HUMAN, FHL1_HUMAN, CCR5_HUMAN, CEAM5_HUMAN, SPON2_HUMAN, 1A68_HUMAN, RBX1_HUMAN, COR1C_HUMAN, VIME_HUMAN, PSME3_HUMAN, and combinations thereof.

[0156] Biomarkers which can be useful for the clinical evaluation and management of colon polyps include the full proteins, peptide fragments, nucleic acids, or transitional ions of the following proteins (UNIprotein ID numbers): SPB6_HUMAN, FRIL_HUMAN, P53_HUMAN, 1A68_HUMAN, ENOA_HUMAN and TKT_HUMAN, TSG6_HUMAN, TPM2_HUMAN, ADT2_HUMAN, FHL1_HUMAN, CCR5_HUMAN, CEAM5_HUMAN, SPON2_HUMAN, 1A68_HUMAN, RBX1_HUMAN, COR1C_HUMAN, VIME_HUMAN, PSME3_HUMAN, MIC1_HUMAN, STK11_HUMAN, IPYR_HUMAN, SBP1_HUMAN, PEBP1_HUMAN, CATD_HUMAN, HPT_HUMAN, ANXA5_HUMAN, ALDOA_HUMAN, LAMA2_HUMAN, CATZ_HUMAN, ACTB_HUMAN, AACT_HUMAN, and combinations thereof Biomarkers which can be useful for the clinical evaluation and management of colon polyps include the transitional ions of FIG. 12.

[0157] The biomarker identified from whole serum by the methods of the disclosure includes full proteins, peptide fragments, nucleic acids, or transitional ions corresponding to the following proteins (UNIprotein ID numbers): Actin, cytoplasmic 1 (ACTB_HUMAN) (SEQ ID NO: 1), Actin, gamma-enteric smooth muscle precursor (ACTH_HUMAN) (SEQ ID NO: 2), Angiotensinogen precursor (ANGT_HUMAN) (SEQ ID NO: 3), Adenosylhomocysteinase (SAHH_HUMAN) (SEQ ID NO: 4), Aldose reductase (ALDR_HUMAN) (SEQ ID NO: 5), RAC-alpha serine/threonine-protein kinase (AKT1_HUMAN) (SEQ ID NO: 6), Serum albumin precursor (ALBU_HUMAN) (SEQ ID NO: 7), Retinal dehydrogenase 1 (AL1A1_HUMAN) (SEQ ID NO: 8), Aldehyde dehydrogenase X, mitochondrial precursor (ALIB1_HUMAN) (SEQ ID NO: 9), Fructose-bisphosphate aldolase A (ALDOA_HUMAN) (SEQ ID NO: 10), Alpha-amylase 2B precursor (AMY2B_HUMAN) (SEQ ID NO: 11), Annexin A1 (ANXA1_HUMAN) (SEQ ID NO: 12), Annexin A3 (ANXA3_HUMAN) (SEQ ID NO: 13), Annexin A4 (ANXA4_HUMAN) (SEQ ID NO: 14), Annexin A5 (ANXA5_HUMAN) (SEQ ID NO: 15), Adenomatous polyposis coli protein (APC_HUMAN) (SEQ ID NO: 16), Apolipoprotein A-I precursor (APOA1_HUMAN) (SEQ ID NO: 17), Apolipoprotein C—I precursor (APOC1_HUMAN) (SEQ ID NO: 18), Beta-2-glycoprotein 1 precursor (APOH_HUMAN) (SEQ ID NO: 19), Rho GDP-dissociation inhibitor 1 (GDIR1_HUMAN) (SEQ ID NO: 20), ATP synthase subunit beta, mitochondrial precursor (ATPB_HUMAN) (SEQ ID NO: 21), B-cell scaffold protein with ankyrin repeats (BANK1_HUMAN) (SEQ ID NO: 22), Uncharacterized protein C18orf8 (MIC1_HUMAN) (SEQ ID NO: 23), Putative uncharacterized protein Clorf195 (CA195_HUMAN) (SEQ ID NO: 24), Complement C3 precursor (CO3_HUMAN) (SEQ ID NO: 25), Complement component C9 precursor (C09_HUMAN) (SEQ ID NO: 26), Carbonic anhydrase 1 (CAH1_HUMAN) (SEQ ID NO: 27), Carbonic anhydrase 2 (CAH2_HUMAN) (SEQ ID NO: 28), Calreticulin precursor (CALR_HUMAN) (SEQ ID NO: 29), Macrophage-capping protein (CAPG_HUMAN) (SEQ ID NO: 30), Signal transducer CD24 precursor (CD24_HUMAN) (SEQ ID NO: 31), CD63 antigen (CD63_HUMAN) (SEQ ID NO: 32), Cytidine deaminase (CDD_HUMAN) (SEQ ID NO: 33), Carcinoembryonic antigen-related cell adhesion molecule 3 (CEAM3_HUMAN) (SEQ ID NO: 34), Carcinoembryonic antigen-related cell adhesion molecule 5 (CEAM5_HUMAN) (SEQ ID NO: 35), Carcinoembryonic antigen-related cell adhesion molecule 6 (CEAM6_HUMAN) (SEQ ID NO: 36), Choriogonadotropin subunit beta precursor (CGHB_HUMAN) (SEQ ID NO: 37), Chitinase-3-like protein 1 precursor (CH3L1_HUMAN) (SEQ ID NO: 38), Creatine kinase B-type (KCRB_HUMAN) (SEQ ID NO: 39), C-type lectin domain family 4 member D (CLC4D_HUMAN) (SEQ ID NO: 40), Clusterin precursor (CLUS_HUMAN) (SEQ ID NO: 41), Calponin-1 (CNN1_HUMAN) (SEQ ID NO: 42), Coronin-1C(COR1C_HUMAN) (SEQ ID NO: 43), C-reactive protein precursor (CRP_HUMAN) (SEQ ID NO: 44), Macrophage colony-stimulating factor 1 precursor (CSF1_HUMAN) (SEQ ID NO: 45), Catenin beta-1 (CTNB1_HUMAN) (SEQ ID NO: 46), Cathepsin D precursor (CATD_HUMAN) (SEQ ID NO: 47), Cathepsin S precursor (CATS_HUMAN) (SEQ ID NO: 48), Cathepsin Z precursor (CATZ_HUMAN) (SEQ ID NO: 49), Cullin-1 (CUL1_HUMAN) (SEQ ID NO: 50), Aspartate—tRNA ligase, cytoplasmic (SYDC_HUMAN) (SEQ ID NO: 51), Neutrophil defensin 1 (DEF1_HUMAN) (SEQ ID NO: 52), Neutrophil defensin 3 (DEF3_HUMAN) (SEQ ID NO: 53), Desmin (DESM_HUMAN) (SEQ ID NO: 54), Dipeptidyl peptidase 4 (DPP4_HUMAN) (SEQ ID NO: 55), Dihydropyrimidinase-related protein 2 (DPYL2_HUMAN) (SEQ ID NO: 56), Cytoplasmic dynein 1 heavy chain 1 (DYHC1_HUMAN) (SEQ ID NO: 57), Delta(3,5)-Delta(2,4)-dienoyl-CoA isomerase, mitochondrial precursor (ECH1_HUMAN) (SEQ ID NO: 58), Elongation factor 2 (EF2_HUMAN) (SEQ ID NO: 59), Eukaryotic initiation factor 4A-III (IF4A3_HUMAN) (SEQ ID NO: 60), Alpha-enolase (ENOA_HUMAN) (SEQ ID NO: 61), Ezrin (EZR1_HUMAN) (SEQ ID NO: 62), Niban-like protein 2 (NIBL2_HUMAN) (SEQ ID NO: 63), Seprase (SEPR_HUMAN) (SEQ ID NO: 64), F-box only protein 4 (FBX4_HUMAN) (SEQ ID NO: 65), Fibrinogen beta chain precursor (FIBB_HUMAN) (SEQ ID NO: 66), Fibrinogen gamma chain (FIBG_HUMAN) (SEQ ID NO: 67), Four and a half LIM domains protein 1 (FHL1_HUMAN) (SEQ ID NO: 68), Filamin-A (FLNA_HUMAN) (SEQ ID NO: 69), FERM domain-containing protein 3 (FRMD3_HUMAN) (SEQ ID NO: 70), Ferritin heavy chain (FRIH_HUMAN) (SEQ ID NO: 71), Ferritin light chain (FRIL_HUMAN) (SEQ ID NO: 72), Tissue alpha-L-fucosidase precursor (FUCO_HUMAN) (SEQ ID NO: 73), Gamma-aminobutyric acid receptor subunit alpha-1 precursor (GBRA1_HUMAN) (SEQ ID NO: 74), Glyceraldehyde-3-phosphate dehydrogenase (G3P_HUMAN) (SEQ ID NO: 75), Glycine—tRNA ligase (SYG_HUMAN) (SEQ ID NO: 76), Growth/differentiation factor 15 precursor (GDF15_HUMAN) (SEQ ID NO: 77), Gelsolin precursor (GELS_HUMAN) (SEQ ID NO: 78), Glutathione S-transferase P (GSTP1_HUMAN) (SEQ ID NO: 79), Hyaluronan-binding protein 2 precursor (HABP2_HUMAN) (SEQ ID NO: 80), Hepatocyte growth factor precursor (HGF_HUMAN) (SEQ ID NO: 81), HLA class I histocompatibility antigen, A-68 alpha chain (1A68_HUMAN) (SEQ ID NO: 82), High mobility group protein B1 (HMGB1_HUMAN) (SEQ ID NO: 83), Heterogeneous nuclear ribonucleoprotein A1 (ROA1_HUMAN) (SEQ ID NO: 84), Heterogeneous nuclear ribonucleoproteins A2/B1 (ROA2_HUMAN) (SEQ ID NO: 85), Heterogeneous nuclear ribonucleoprotein F (HNRPF_HUMAN) (SEQ ID NO: 86), Haptoglobin precursor (HPT_HUMAN) (SEQ ID NO: 87), Heat shock protein HSP 90-beta (HS90B_HUMAN) (SEQ ID NO: 88), Endoplasmin precursor (ENPL_HUMAN) (SEQ ID NO: 89), Stress-70 protein, mitochondrial precursor (GRP75_HUMAN) (SEQ ID NO: 90), Heat shock protein beta-1 (HSPB1_HUMAN) (SEQ ID NO: 91), 60 kDa heat shock protein, mitochondrial (CH60_HUMAN) (SEQ ID NO: 92), Bone sialoprotein 2 (SIAL_HUMAN) (SEQ ID NO: 93), Intraflagellar transport protein 74 homolog (IFT74_HUMAN) (SEQ ID NO: 94), Insulin-like growth factor I (IGF1_HUMAN) (SEQ ID NO: 95), Ig alpha-2 chain C region (IGHA2_HUMAN) (SEQ ID NO: 96), Interleukin-2 receptor subunit beta precursor (IL2RB_HUMAN) (SEQ ID NO: 97), Interleukin-8 (IL8_HUMAN) (SEQ ID NO: 98), Interleukin-9 (IL9_HUMAN) (SEQ ID NO: 99), GTPase KRas precursor (RASK_HUMAN) (SEQ ID NO: 100), Keratin, type I cytoskeletal 19 (K1C19_HUMAN) (SEQ ID NO: 101), Keratin, type II cytoskeletal 8 (K2C8_HUMAN) (SEQ ID NO: 102), Laminin subunit alpha-2 precursor (LAMA2_HUMAN) (SEQ ID NO: 103), Galectin-3 (LEG3_HUMAN) (SEQ ID NO: 104), Lamin-B1 precursor (LMNB1_HUMAN) (SEQ ID NO: 105), Microtubule-associated protein RP/EB family member 1 (MARE1_HUMAN) (SEQ ID NO: 106), DNA replication licensing factor MCM4 (MCM4_HUMAN) (SEQ ID NO: 107), Macrophage migration inhibitory factor (MIF_HUMAN) (SEQ ID NO: 108), Matrilysin precursor (MMP7_HUMAN) (SEQ ID NO: 109), Matrix metalloproteinase-9 precursor (MMP9_HUMAN) (SEQ ID NO: 110), B-lymphocyte antigen CD20 (CD20_HUMAN) (SEQ ID NO: 111), Myosin light polypeptide 6 (MYL6_HUMAN) (SEQ ID NO: 112), Myosin regulatory light polypeptide 9 (MYL9_HUMAN) (SEQ ID NO: 113), Nucleoside diphosphate kinase A (NDKA_HUMAN) (SEQ ID NO: 114), Nicotinamide N-methyltransferase (NNMT_HUMAN) (SEQ ID NO: 115), Alpha-1-acid glycoprotein 1 precursor (AlAG1_HUMAN) (SEQ ID NO: 116), Phosphoenolpyruvate carboxykinase [GTP], mitochondrial precursor (PCKGM_HUMAN) (SEQ ID NO: 117), Protein disulfide-isomerase A3 precursor (PDIA3_HUMAN) (SEQ ID NO: 118), Protein disulfide-isomerase A6 precursor (PDIA6_HUMAN) (SEQ ID NO: 119), Pyridoxal kinase (PDXK_HUMAN) (SEQ ID NO: 120), Phosphatidylethanolamine-binding protein 1 (PEBP1_HUMAN) (SEQ ID NO: 121), Phosphatidylinositol transfer protein alpha isoform (PIPNA_HUMAN) (SEQ ID NO: 122), Pyruvate kinase isozymes M1/M2 (KPYM_HUMAN) (SEQ ID NO: 123), Urokinase-type plasminogen activator precursor (UROK_HUMAN) (SEQ ID NO: 124), Inorganic pyrophosphatase (IPYR_HUMAN) (SEQ ID NO: 125), Peroxiredoxin-1 (PRDX1_HUMAN) (SEQ ID NO: 126), Serine/threonine-protein kinase D1 (KPCD1_HUMAN) (SEQ ID NO: 127), Prolactin (PRL_HUMAN) (SEQ ID NO: 128), Transmembrane gamma-carboxyglutamic acid protein 4 precursor (TMG4_HUMAN) (SEQ ID NO: 129), Proteasome activator complex subunit 3 (PSME3_HUMAN) (SEQ ID NO: 130), Phosphatidylinositol 3,4,5-trisphosphate 3-phosphatase and dual-specificity protein phosphatase PTEN (PTEN_HUMAN) (SEQ ID NO: 131), Focal adhesion kinase 1 (FAK1_HUMAN) (SEQ ID NO: 132), Protein-tyrosine kinase 2-beta (FAK2_HUMAN) (SEQ ID NO: 133), E3 ubiquitin-protein ligase RBX1 (RBX1_HUMAN) (SEQ ID NO: 134), Regenerating islet-derived protein 4 precursor (REG4_HUMAN) (SEQ ID NO: 135), Transforming protein RhoA (RHOA_HUMAN) (SEQ ID NO: 136), Rho-related GTP-binding protein RhoB (RHOB_HUMAN) (SEQ ID NO: 137), Rho-related GTP-binding protein RhoC (RHOC_HUMAN) (SEQ ID NO: 138), 40S ribosomal protein SA (RSSA_HUMAN) (SEQ ID NO: 139), Ribosome-binding protein 1 (RRBP1_HUMAN) (SEQ ID NO: 140), Protein S100-All (S10AB_HUMAN) (SEQ ID NO: 141), Protein S100-A12 (S10AC_HUMAN) (SEQ ID NO: 142), Protein S100-A8 (S10A8_HUMAN) (SEQ ID NO: 143), Protein S100-A9 (S10A9_HUMAN) (SEQ ID NO: 144), Serum amyloid A-1 protein (SAA1_HUMAN) (SEQ ID NO: 145), Serum amyloid A-2 protein precursor (SAA2_HUMAN) (SEQ ID NO: 146), Secretagogin (SEGN_HUMAN) (SEQ ID NO: 147), Serologically defined colon cancer antigen 3 (SDCG3_HUMAN) (SEQ ID NO: 148), Succinate dehydrogenase [ubiquinone] flavoprotein subunit, mitochondrial precursor (DHSA_HUMAN) (SEQ ID NO: 149), Selenium-binding protein 1 (SBP1_HUMAN) (SEQ ID NO: 150), P-selectin glycoprotein ligand 1 precursor (SELPL_HUMAN) (SEQ ID NO: 151), Septin-9 (SEPT9_HUMAN) (SEQ ID NO: 152), Alpha-1-antitrypsin precursor (A1AT_HUMAN) (SEQ ID NO: 153), Alpha-1-antichymotrypsin precursor (AACT_HUMAN) (SEQ ID NO: 154), Leukocyte elastase inhibitor (ILEU_HUMAN) (SEQ ID NO: 155), Serpin B6 (SPB6_HUMAN) (SEQ ID NO: 156), Splicing factor 3B subunit 3 (SF3B3_HUMAN) (SEQ ID NO: 157), S-phase kinase-associated protein 1 (SKP1_HUMAN) (SEQ ID NO: 158), ADP/ATP translocase 2 (ADT2_HUMAN) (SEQ ID NO: 159), Pancreatic secretory trypsin inhibitor (ISK1_HUMAN) (SEQ ID NO: 160), Spondin-2 (SPON2_HUMAN) (SEQ ID NO: 161), Osteopontin (OSTP_HUMAN) (SEQ ID NO: 162), Proto-oncogene tyrosine-protein kinase Src (SRC_HUMAN) (SEQ ID NO: 163), Serine/threonine-protein kinase STK11 (STK11_HUMAN) (SEQ ID NO: 164), Heterogeneous nuclear ribonucleoprotein Q (HNRPQ_HUMAN) (SEQ ID NO: 165), T-cell acute lymphocytic leukemia protein 1 (TAL1_HUMAN) (SEQ ID NO: 166), Serotransferrin precursor (TRFE_HUMAN) (SEQ ID NO: 167), Thrombospondin-1 precursor (TSP1_HUMAN) (SEQ ID NO: 168), Metalloproteinase inhibitor 1 (TIMP1_HUMAN) (SEQ ID NO: 169), Transketolase (TKT_HUMAN) (SEQ ID NO: 170), Tumor necrosis factor-inducible gene 6 protein precursor (TSG6_HUMAN) (SEQ ID NO: 171), Tumor necrosis factor receptor superfamily member 10B (TR10B_HUMAN) (SEQ ID NO: 172), Tumor necrosis factor receptor superfamily member 6B (TNF6B_HUMAN) (SEQ ID NO: 173), Cellular tumor antigen p53 (P53_HUMAN) (SEQ ID NO: 174), Tropomyosin beta chain (TPM2_HUMAN) (SEQ ID NO: 175), Translationally-controlled tumor protein (TCTP_HUMAN) (SEQ ID NO: 176), Heat shock protein 75 kDa, mitochondrial precursor (TRAP1_HUMAN) (SEQ ID NO: 177), Thiosulfate sulfurtransferase (THTR_HUMAN) (SEQ ID NO: 178), Tubulin beta-1 chain (TBB1_HUMAN) (SEQ ID NO: 179), UDP-glucose 6-dehydrogenase (UGDH_HUMAN) (SEQ ID NO: 180), UTP—glucose-1-phosphate uridylyltransferase (UGPA_HUMAN) (SEQ ID NO: 181), Vascular endothelial growth factor A (VEGFA_HUMAN) (SEQ ID NO: 182), Villin-1 (VILI_HUMAN) (SEQ ID NO: 183), Vimentin (VIME_HUMAN) (SEQ ID NO: 184), Pantetheinase precursor (VNN1_HUMAN) (SEQ ID NO: 185), 14-3-3 protein zeta/delta (1433Z_HUMAN) (SEQ ID NO: 186), C—C chemokine receptor type 5 (CCR5_HUMAN) (SEQ ID NO: 187), or Plasma alpha-L-fucosidase (FUCO2_HUMAN) (SEQ ID NO: 188). The methods of the present invention contemplate determining the expression level of at least one, at least two, at least three, at least four, at least five, at least six, at least seven, at least eight, at least nine biomarkers provide above. The methods may involve determination of the expression levels of at least ten, at least fifteen, or at least twenty of the biomarkers provide above.

[0158] For all aspects of the present disclosure, the methods may further include determining the expression level of at least two biomarkers provide herein. It is further contemplated that the methods of the present disclosure may further include determining the expression levels of at least three, at least four, at least five, at least six, at least seven, at least eight, at least nine biomarkers provide herein. The methods may involve determination of the expression levels of at least ten, at least fifteen, or at least twenty of the biomarkers provide herein.

[0159] The biomarker identified from whole serum by the methods of the disclosure includes peptide/protein fragments or genes corresponding to the following proteins: SCDC26 (CD26), CEA molecule 5 (CEACAM5), CA195 (CCR5), CA19-9, M2PK (PKM2), TIMP1, P-selectin (SELPLG), VEGFA, HcGB (CGB), VILLIN, TATI (SPINK1), and A-L-fucosidase (FUCA2). Groupings of two, three, four, five, six, seven, eight, nine, ten, eleven, and all twelve of the above proteins or genes are included. Such groupings may exclude proteins or genes within this set or may exclude additional proteins or genes, or may further comprise additional proteins.

[0160] The biomarker identified from whole serum by the methods of the disclosure includes peptide/protein fragments or genes corresponding to the following proteins: ANXA5, GAPDH, PKM2, ANXA4, GARS, RRBP1, KRT8, SYNCRIP, S100A9, ANXA3, CAPG, HNRNPF, PPA1, NME1, PSME3, AHCY, TPT1, HSPB1, and RPSA. Groupings of two, three, four, five, six, seven, eight, nine, ten, eleven, twelve, thirteen, fourteen, fifteen, sixteen, seventeen, eighteen, and all nineteen of the above proteins or genes are included. Such groupings may exclude proteins or genes within this set or may exclude additional proteins or genes, or may further comprise additional proteins.

[0161] The biomarker identified from whole serum by the methods of the disclosure includes peptide/protein fragments or genes corresponding to the proteins identified in FIG. 9. Groupings of two, three, four, five, six, seven, eight, nine, ten, eleven, twelve, and more of the above proteins or genes are included. Such groupings may exclude proteins or genes within this set or may exclude additional proteins, or may further comprise additional proteins.

[0162] It is known that proteins frequently exist in a sample in a plurality of different forms as they can associate in various forms for various protein complexes. These forms can result from either, or both, of pre- and post-translational modification. Pre-translational modified forms include allelic variants, slice variants and RNA editing forms. In such instances, it is know that gene expression product will present in various homologies to proteins defined in the human databases. Therefore the disclosure appreciates that there can be various versions of the defined biomarkers. For instance, said sequence homology is selected from the group of greater than 75%, greater than 80%, greater than 85%, greater than 90%, greater than 95%, and greater than 99%. Additionally, there can be post-translationally modified forms of the biomarkers. Post-translationally modified forms include, but are not limited to, forms resulting from proteolytic cleavage (e.g., fragments of a parent protein), glycosylation, phosphorylation, lipidation, oxidation, methylation, cystinylation, sulphonation and acetylation of the protein biomarkers.

[0163] The biomarkers of the present disclosure include the full-length protein, their corresponding RNA or DNA and all modified forms. Modified forms of the biomarker include for example any splice-variants of the disclosed biomarkers and their corresponding RNA or DNA which encode them. In certain cases the modified forms, or truncated versions of the proteins, or their corresponding RNA or DNA, may exhibit better discriminatory power in diagnosis than the full-length protein.

[0164] A truncated or fragment of a protein, polypeptide or peptide generally refers to N-terminally and/or C-terminally deleted or truncated forms of said protein, polypeptide or peptide. The term encompasses fragments arising by any mechanism, such as, without limitation, by alternative translation, exo- and/or endo-proteolysis and/or degradation of said peptide, polypeptide or protein, such as, for example, in vivo or in vitro, such as, for example, by physical, chemical and/or enzymatic proteolysis. Without limitation, a truncated or fragment of a protein, polypeptide or peptide may represent at least about 5%, or at least about 10%, e.g., >20%, >30% or >40%, such as >50%, e.g., >60%, >70%, or >80%, or even 90% or >95% of the amino acid sequence of said protein, polypeptide or peptide.

[0165] Without limitation, a truncated or fragment of a protein may include a sequence of 5 consecutive amino acids, or 10 consecutive amino acids, or 20 consecutive amino acids, or 30 consecutive amino acids, or more than 50 consecutive amino acids, e.g., 60, 70, 80, 90, 100, 200, 300, 400, 500 or 600 consecutive amino acids of the corresponding full length protein.

[0166] In some instances, a fragment may be N-terminally and/or C-terminally truncated by between 1 and about 20 amino acids, such as, e.g., by between 1 and about 15 amino acids, or by between 1 and about 10 amino acids, or by between 1 and about 5 amino acids, compared to the corresponding mature, full-length protein or its soluble or plasma circulating form.

[0167] Any protein biomarker of the present disclosure such as a peptide, polypeptide or protein and fragments thereof may also encompass modified forms of said marker, peptide, polypeptide or protein and fragments such as bearing post-expression modifications including but not limited to, modifications such as phosphorylation, glycosylation, lipidation, methylation, cysteinylation, sulphonation, glutathionylation, acetylation, oxidation of methionine to methionine sulphoxide or methionine sulphone, and the like.

[0168] In some instances, fragments of a given protein, polypeptide or peptide may be achieved by in vitro proteolysis of said protein, polypeptide or peptide to obtain advantageously detectable peptide(s) from a sample. For example, such proteolysis may be effected by suitable physical, chemical and/or enzymatic agents, e.g., proteinases, preferably endoproteinases, i.e., protease cleaving internally within a protein, polypeptide or peptide chain.

[0169] Suitable non-limiting examples of endoproteinases include but are not limited to serine proteinases (EC 3.4.21), threonine proteinases (EC 3.4.25), cysteine proteinases (EC 3.4.22), aspartic acid proteinases (EC 3.4.23), metalloproteinases (EC 3.4.24) and glutamic acid proteinases. Exemplary non-limiting endoproteinases include trypsin, chymotrypsin, elastase, Lysobacter enzymogenes endoproteinase Lys-C, Staphylococcus aureus endoproteinase Glu-C (endopeptidase V8) or Clostridium histolyticum endoproteinase Arg-C (clostripain).

[0170] Preferably, the proteolysis may be effected by endopeptidases of the trypsin type (EC 3.4.21.4), preferably trypsin, such as, without limitation, preparations of trypsin from bovine pancreas, human pancreas, porcine pancreas, recombinant trypsin, Lys-acetylated trypsin, trypsin in solution, trypsin immobilised to a solid support, etc. Trypsin is particularly useful, inter alia due to high specificity and efficiency of cleavage. The disclosure also provide for the use of any trypsin-like protease, i.e., with a similar specificity to that of trypsin. Otherwise, chemical reagents may be used for proteolysis. By way of example only, CNBr can cleave at Met; BNPS-skatole can cleave at Trp. The conditions for treatment, e.g., protein concentration, enzyme or chemical reagent concentration, pH, buffer, temperature, time, can be determined by the skilled person depending on the enzyme or chemical reagent employed. Further known or yet to be identified enzymes may be used with the present disclosure on the basis of their cleavage specificity and frequency to achieve desired peptide forms.

[0171] In some instances, a fragmented protein or peptide may be N-terminally and/or C-terminally truncated and is one or all transitional ions of the N-terminally (a, b, c-ion) and/or C-terminally (x, y, z-ion) truncated protein or peptide. For example, if the peptide fragment is comprised of the amino acid sequence IAELLSPGSVDPLTR then a transitional ion biomarker of the peptide fragment can include the one or more of the following transitional ion biomarkers provided in TABLE 1.

TABLE 1
Example of all transitional ions for
the peptide sequence IAELLSPGSVDPLTR

| Transitional Ion | Amino Acid Sequence |
|---|---|
| b1 | I |
| b2 | IA |
| b3 | IAE |
| b4 | IAEL |
| b5 | IAELL |
| b6 | IAELLS |
| b7 | IAELLSP |
| b8 | IAELLSPG |
| b9 | IAELLSPGS |
| b10 | IAELLSPGSV |
| b11 | IAELLSPGSVD |
| b12 | IAELLSPGSVDP |
| b13 | IAELLSPGSVDPL |
| b14 | IAELLSPGSVDPLT |
| y14 | AELLSPGSVDPLTR |
| y13 | ELLSPGSVDPLTR |
| y12 | LLSPGSVDPLTR |
| y11 | LSPGSVDPLTR |
| y10 | SPGSVDPLTR |
| y9 | PGSVDPLTR |
| y8 | GSVDPLTR |
| y7 | SVDPLTR |
| y6 | VDPLTR |
| y5 | DPLTR |
| y4 | PLTR |
| y3 | LTR |
| y2 | TR |
| y1 | R |

[0172] The biomarkers of the present disclosure include the binding partners of SCDC26 (CD26), CEA molecule 5 (CEACAM5), CA195 (CCR5), CA19-9, M2PK (PKM2), TIMP1, P-selectin (SELPLG), VEGFA, HcGB (CGB), VILLIN, TATI (SPINK1), and A-L-fucosidase (FUCA2). Groupings of two, three, four, five, six, seven, eight, nine, ten, eleven, and all twelve of the above proteins are included. Such groupings may exclude proteins within this set or may exclude additional proteins, or may further comprise additional proteins.

[0173] The biomarkers of the present disclosure include the binding partners of ANXA5, GAPDH, PKM2, ANXA4, GARS, RRBP1, KRT8, SYNCRIP, S100A9, ANXA3, CAPG, HNRNPF, PPA1, NME1, PSME3, AHCY, TPT1, HSPB1, and RPSA. Groupings of two, three, four, five, six, seven, eight, nine, ten, eleven, twelve, thirteen, fourteen, fifteen, sixteen, seventeen, eighteen, and all nineteen of the above proteins are included. Such groupings may exclude proteins within this set or may exclude additional proteins, or may further comprise additional proteins.

[0174] Exemplary human markers, nucleic acids, proteins or polypeptides as taught herein may be as annotated under NCBI Genbank (http://www.ncbi.nlm.nih.gov/) or Swissprot/Uniprot (http://www.uniprot.org/) accession numbers. In some instances said sequences may be of precursors (e.g., preproteins) of the of markers, nucleic acids, proteins or polypeptides as taught herein and may include parts which are processed away from mature molecules. In some instances although only one or more isoforms may be disclosed, all isoforms of the sequences are intended.

[0175] The biomarkers of the present disclosure include the binding partners of the proteins identified in FIG. 9. Groupings of two, three, four, five, six, seven, eight, nine, ten, eleven, twelve, and more of the above proteins are included. Such groupings may exclude proteins within this set or may exclude additional proteins, or may further comprise additional proteins.

[0176] The above-identified biomarkers are examples of biomarkers, as determined by molecular weights and partial sequences, identified by the methods of the disclosure and serve merely as an illustrative example and are not meant to limit the disclosure in any way. Suitable methods can be used to detect one or more of the biomarkers or modified biomarkers are described herein. In some aspect the disclosure provides for performing an analysis of the biological sample for the presence additional biomarkers of one or more analytes selected from the groups consisting of metabolites, DNA sequences, RNA sequences, and combinations thereof. The biomarkers listed herein can be further combined with other information such as genetic analysis, for example such as whole genome DNA or RNA sequencing from subjects.

[0177] All aspects of the present disclosure may also be practiced with a limited number of the disclosed biomarkers, their binding partners, splice-variants and corresponding DNA and RNA.

[0178] In addition to the corresponding DNA and RNA, variations found within DNA and RNA of the biomarker provide by the present disclosure may provide a means for distinguishing clinical status of an individual. Examples of such DNA and RNA genetic variation markers that can be used with the present methods include but are not limited to restriction fragment length polymorphisms, single nucleotide DNA polymorphisms, single nucleotide cDNA polymorphisms, single nucleotide RNA polymorphisms, single nucleotide RNA polymorphisms, insertions, deletions, indels, microsatellite repeats (simple sequence repeats), minisatellite repeats (variable number of tandem repeats), short tandem repeats, transposable elements, randomly amplified polymorphic DNA, and amplification fragment length polymorphism.

[0179] Biomarker Profiles

[0180] The present methods of the disclosure also provide for biomarker profiles to be generated and use in a commercial medical diagnostic product or kits.

[0181] The methods provide for biomarker profiles to be determined in a number of ways and may be the combination of measurable biomarkers or aspects of biomarkers using methods such as ratios, or other more complex association methods or algorithms (e.g., rule-based methods). A biomarker profile can comprise at least two measurements, where the measurements can correspond to the same or different biomarkers. A biomarker profile may also comprise at least 3, 4, 5, 10, 15, 20, 25, 30, 35, 40, 45, 50, 55 or more measurements. In some applications, a biomarker profile comprises hundreds, or even thousands, of measurements. A biomarker profile may comprise of measurements only from an individual, or from and individual and of measurements from a stratified population known to be related to the individual or a stratified population known not to be related to the individual, or both.

[0182] In addition, the biomarker profiles also provide for the presence or absence or quantity of the biomarkers provided herein may be evaluated each separately and independently, or the presence or absence and/or quantity of such other biomarkers may be included within subject profiles or reference profiles established in the methods disclosed herein.

### V. Applications of Biomarkers

[0183] In general the method includes at least the following steps: (a) obtaining a biological sample, (b) performing analysis of biological sample, (c) comparing the sample to a reference control, and (d) correlating the presence or amount of proteins with a subject's colon polyp status. In some aspects of the disclosure, quantification involves normalizing measurements to internal standard controls known to be at a constant level. In other aspects of the disclosure, quantification involves comparing to reference controls from healthy non-diseased subjects with no tumors and determining differential expression. In other aspects of the disclosure, quantification involves comparing to reference controls from diseased subjects with tumors and determining differential expression. Data obtained from this method can be used to create a “profile” used to predict disease state, recurrence, or response to treatment. Test results may be compared to a standard profile once it is created and correlations to responses may be derived. It should be understood the profiles described are generally optimized. The present disclosure is not limited to the use of this particular biomarker profile. Any combination of one or more markers that provides useful information can be used in the methods of the present disclosure. For example, it should be understood that one or more markers can be added or subtracted from the signatures, while maintaining the ability of the signatures to yield useful information.

[0184] In one aspect of the disclosure, quantification of all or some or a combination of the biomarkers can be used to detect the likelihood of the presence of a colon polyp in a subject. In another aspect of the disclosure, all or some or a combination of the biomarkers can be used to detect the nature of the colon tumor the identification of one or more properties of a sample in a subject, including but not limited to, the presence of benign, type of polyp, pre-cancerous stage, degree of dysplasia, subtype adenomatous polyp, or subtype of benign colon tumor disease and prognosis. In one aspect of the disclosure, all or some or a combination of the biomarkers can be used to the likelihood of developing colon tumors or polyps. In one aspect of the disclosure, all or some or a combination of the biomarkers can be used to rule out the presence of a colon tumor or polyp, i.e., to determine the absence of a colon polyp, carcinoma or both in a subject. In another aspect of the disclosure, all or some or a combination of the biomarkers can be used determined the nature of the tumor, that is whether it is a benign tumor polyp, malignant tumor, adenomatous polyp, pedunculated polyp or sessile polyp type.

[0185] In one aspect of the disclosure, all or some or a combination of the biomarkers can be used to generate a report that aids in the next steps for the clinical management of the colorectal cancer or a colon tumor. In one aspect of the disclosure, all or some or a combination of the biomarkers can be used to monitor the responsiveness to various treatments for colorectal cancer or colon tumors. In one aspect of the disclosure, all or some or a combination of the biomarkers can be used to monitor a subject that has a predisposition for developing colorectal cancer or colon tumors. In one aspect of the disclosure, all or some or a combination of the biomarkers can be used to monitor a subject for reoccurrence of colorectal cancer or colon tumors. In one aspect of the disclosure, all or some or a combination of the biomarkers can be used to monitor a subject recurrence of colorectal cancer or polyps.

[0186] In some embodiments, the method comprises identifying a profile of the biomarkers in the cells of the biological sample from a subject wherein said pattern is correlated to the likelihood of disease or condition or response.

[0187] In some aspects of this method, the one more of the biomarker or a biomarker profile is detected by quantifying expression levels of proteins by, for example, quantitative immunofluorescence or ELISA-based assay, flow cytometry or other immunoassay provide herein. In some aspects of this method the biomarker profile is detected expression levels of polynucleotides by, for example, by real-time PCR using primer sets that specifically amplify the biomarkers corresponding DNA or RNA. In another aspect of the disclosure the profile is detected by a biochip that contains capture features for biomarkers (e.g. antibodies, probes, ect.). Biochips can detect the presence of a biomarker profile by expression levels of polynucleotides, for example mRNA, in a biological sample or from a subject, alternatively, by expression levels of proteins in a patient sample using, for example, antibodies. In another some embodiment, a tumor cell profile is detected by real-time PCR using primer sets that specifically amplify the genes comprising the cancer stem cell signature. In other embodiments of the disclosure, microarrays are provided that contain polynucleotides or proteins (i.e. antibodies) that detect the expression of a cancer stem cell signature for use in prognosis.

[0188] A biological sample's biomarker profile may be compared to a reference profile and results can be determined. In one aspect of the disclosure, data generated from the tests described herein are compared to a reference profile defined by a profile model derived from measurements from one or a plurality of biological samples. A test may be structured so that an individual patient sample may be viewed with these populations in mind and allocated to one population or the other, or a mixture of both and subsequently to use this correlation to patient management, therapy, prognosis, etc.

[0189] In one aspect of the disclosure, data generated from the methods and kit tests described herein are used with visualizing means is capable of indicating whether the quantity of said one or more markers or fragments in the sample is above or below a certain threshold level or whether the quantity of said one or more markers or fragments in the sample deviates or not from a reference value of the quantity of said one or more markers or fragments, said reference value representing a known diagnosis, prediction or prognosis of the diseases or conditions as taught herein.

[0190] In one aspect of the disclosure, data generated from the methods and kit tests described herein determined as a threshold level is chosen such that the quantity of said one or more markers and/or fragments in the sample above or below (depending on the marker and the disease or condition) said threshold level indicates that the subject has or is at risk of having the respective disease or condition or indicates a poor prognosis for such in the subject, and the quantity of said one or more markers and/or fragments in the sample below or above (depending on the marker and the disease or condition) said threshold level indicates that the subject does not have or is not at risk of having the diseases or conditions as taught herein or indicates a good prognosis for such in the subject.

[0191] In one aspect of the disclosure, data generated from the methods and kit test described herein determined a relative quantity of a nucleic acid molecule or an analyte in a sample may be advantageously expressed as an increase or decrease or as a fold-increase or fold-decrease relative to said another value, such as relative to a reference value, weight or rank as taught herein. Performing a relative comparison between first and second parameters (e.g., first and second quantities) may but need not require to first determine the absolute values of said first and second parameters. For example, a measurement method can produce quantifiable readouts (such as, e.g., signal intensities) for said first and second parameters, wherein said readouts are a function of the value of said parameters, and wherein said readouts can be directly compared to produce a relative value for the first parameter vs. the second parameter, without the actual need to first convert the readouts to absolute values of the respective parameters.

[0192] A. Sensitivity and Specificity

[0193] Sensitivity and specificity are statistical measures of the performance of a binary classification test. A perfect classification predictor would be described as 100% sensitive (i.e. predicting all people from the sick group as sick) and 100% specific (i.e. not predicting anyone from the healthy group as sick); however, theoretically any classification predictor will possess a minimum error. (Altman D G, Bland J M (1994). “Diagnostic tests Sensitivity and Specificity”. BMJ 308 (6943): 1552 and Loong T (2003). “Understanding sensitivity and specificity with the right side of the brain”. BMJ 327 (7417): 716-719).

[0194] In one aspect of the method of the disclosure using all or some or a combination of the biomarkers achieves a sensitivity selected from greater than 60% true positives, 70% true positives, 75% true positives, 85% true positives, 90% true positives, 95% true positives, or 99% true positives for the subject's adenoma or polyp status. In one aspect of the method of the disclosure using all or some or a combination of the biomarkers achieves a specificity selected from greater than 60% true negatives, 70% true negatives, 75% true negatives, 85% true negatives, 90% true negatives, 95% true negatives, or 99% true negatives for the subject's adenoma, cancer, or polyp status. In one aspect of the method of the disclosure using all or some or a combination of the biomarkers the presence of absence of colorectal carcinoma is excluded or is not determined. In one aspect of the method of the disclosure the presence of absence of the adenoma, cancer, or polyp status is confirmed by additional tests such as a colonoscopy, other imaging method or diagnostic test or surgery. In one aspect of the method of the disclosure using all or some or a combination of the biomarkers achieves a sensitivity and specificity selected from greater than 70% true positives and less than 30% true negatives, 75% true positives and less than 25% true negatives, 85% true positives and less than 15% true negatives, 90% true positives and less than 10% true negatives, 95% true positives and less than 5% true negatives, or 99% true positives for and less than 1% true negatives for the subject's adenoma, cancer, or polyp status.

[0195] In one aspect of the method of the disclosure using all or some or a combination of the biomarkers achieves a sensitivity selected from greater than 70% true positives, 75% true positives, 85% true positives, 90% true positives, 95% true positives, or 99% true positives for the subject's presence of absence of colorectal carcinoma. In one aspect of the method of the disclosure using all or some or a combination of the biomarkers achieves a specificity selected from greater than 70% true negatives, 75% true negatives, 85% true negatives, 90% true negatives, 95% true negatives, or 99% true negatives for the subject's presence of absence of colorectal carcinoma. In one aspect of the method of the disclosure does not detect the presence of absence of colorectal carcinoma. In one aspect of the method of the disclosure the presence of absence of colorectal carcinoma is confirmed by additional tests such as a colonoscopy, other imaging method or diagnostic test or surgery. In one aspect of the method of the disclosure using all or some or a combination of the biomarkers achieves a sensitivity and specificity selected from greater than 70% true positives and less than 30% true negatives, 75% true positives and less than 25% true negatives, 85% true positives and less than 15% true negatives, 90% true positives and less than 10% true negatives, 95% true positives and less than 5% true negatives, or 99% true positives for and less than 1% true negatives for the subject's presence of absence of colorectal carcinoma.

[0196] In one aspect of the method of the disclosure using all or some or a combination of the biomarkers achieves a sensitivity selected from greater than 70% true positives, 75% true positives, 85% true positives, 90% true positives, 95% true positives, or 99% true positives for the subject's presence of absence of adenomatous polyp or polypoid adenoma. In one aspect of the method of the disclosure using all or some or a combination of the biomarkers achieves a specificity selected from greater than 70% true negatives, 75% true negatives, 85% true negatives, 90% true negatives, 95% true negatives, or 99% true negatives for the subject's presence of absence of adenomatous polyp or polypoid adenoma. In one aspect of the method of the disclosure the adenomatous polyp or polypoid adenoma is confirmed by additional tests such as a colonoscopy, other imaging method or diagnostic test or surgery. In one aspect of the method of the disclosure using all or some or a combination of the biomarkers achieves a sensitivity and specificity selected from greater than 70% true positives and less than 30% true negatives, 75% true positives and less than 25% true negatives, 85% true positives and less than 15% true negatives, 90% true positives and less than 10% true negatives, 95% true positives and less than 5% true negatives, or 99% true positives for and less than 1% true negatives for the subject's presence of absence of adenomatous polyp or polypoid adenoma.

[0197] In one aspect of the method of the disclosure using all or some or a combination of the biomarkers achieves a sensitivity selected from greater than 70% true positives, 75% true positives, 85% true positives, 90% true positives, 95% true positives, or 99% true positives for the subject's presence of absence of pedunculated polyps and sessile polyps. In one aspect of the method of the disclosure using all or some or a combination of the biomarkers achieves a specificity selected from greater than 70% true negatives, 75% true negatives, 85% true negatives, 90% true negatives, 95% true negatives, or 99% true negatives for the subject's presence of absence of pedunculated polyps and sessile polyps. In one aspect of the method of the disclosure the of pedunculated polyps and sessile polyps is confirmed by additional tests such as a colonoscopy, other imaging method or diagnostic test or surgery. In one aspect of the method of the disclosure using all or some or a combination of the biomarkers achieves a sensitivity and specificity selected from greater than 70% true positives and less than 30% true negatives, 75% true positives and less than 25% true negatives, 85% true positives and less than 15% true negatives, 90% true positives and less than 10% true negatives, 95% true positives and less than 5% true negatives, or 99% true positives for and less than 1% true negatives for the subject's presence of absence of pedunculated polyps and sessile polyps.

[0198] In one aspect of the method of the disclosure using all or some or a combination of the biomarkers achieves a sensitivity selected from greater than 70% true positives, 75% true positives, 85% true positives, 90% true positives, 95% true positives, or 99% true positives for the subject's adenomatous polyp or polypoid adenoma is characterized according to a degree of cell dysplasia or pre-malignancy. In one aspect of the method of the disclosure using all or some or a combination of the biomarkers achieves a specificity selected from greater than 70% true negatives, 75% true negatives, 85% true negatives, 90% true negatives, 95% true negatives, or 99% true negatives for the subject's adenomatous polyp or polypoid adenoma is characterized according to a degree of cell dysplasia or pre-malignancy. In one aspect of the method of the disclosure the adenomatous polyp or polypoid adenoma is characterized according to a degree of cell dysplasia or pre-malignancy confirmed by additional tests such as a colonoscopy, other imaging method or diagnostic test or surgery. In one aspect of the method of the disclosure using all or some or a combination of the biomarkers achieves a sensitivity and specificity selected from greater than 70% true positives and less than 30% true negatives, 75% true positives and less than 25% true negatives, 85% true positives and less than 15% true negatives, 90% true positives and less than 10% true negatives, 95% true positives and less than 5% true negatives, or 99% true positives for and less than 1% true negatives for the subject's adenomatous polyp or polypoid adenoma is characterized according to a degree of cell dysplasia or pre-malignancy.

### VI. Systems

[0199] The systems and methods of the present disclosure are enacted on and/or by using one or more computer processor systems. Examples of computer systems of the disclosure are described below. Variations upon the described computer systems are possible so long as they provide the platform for the systems and methods of the disclosure.

[0200] An example of computer system of the disclosure is illustrated in FIG. 13. The computer system 1300 illustrated in FIG. 13 may be understood as a logical apparatus that can read instructions from media 1311 and/or a network port 1305, which can optionally be connected to server 1309 having fixed media 1312. The system, such as shown in FIG. 13 can include a CPU 1301, disk drives 1303, optional input devices such as keyboard 1315 and/or mouse 1316 and optional monitor 1307. Data communication can be achieved through the indicated communication medium to a server at a local or a remote location. The communication medium can include any means of transmitting and/or receiving data. For example, the communication medium can be a network connection, a wireless connection or an internet connection. Such a connection can provide for communication over the World Wide Web. It is envisioned that data relating to the present disclosure can be transmitted over such networks or connections for reception and/or review by a party 1322 as illustrated in FIG. 13.

[0201] FIG. 14 is a block diagram illustrating an example architecture of a computer system 1400 that can be used in connection with example embodiments of the present disclosure. As depicted in FIG. 14, the example computer system can include a processor 1402 for processing instructions. Non-limiting examples of processors include: Intel Xeon™ processor, AMD Opteron™ processor, Samsung 32-bit RISC ARM 1176JZ(F)-S vl.O™ processor, ARM Cortex-A8 Samsung S5PC100™ processor, ARM Cortex-A8 Apple A4™ processor, Marvell PXA 930™ processor, or a functionally-equivalent processor. Multiple threads of execution can be used for parallel processing. In some aspects of the disclosure, multiple processors or processors with multiple cores can also be used, whether in a single computer system, in a cluster, or distributed across systems over a network comprising a plurality of computers, cell phones, and/or personal data assistant devices.

[0202] As illustrated in FIG. 14, a high speed cache 1404 can be connected to, or incorporated in, the processor 1402 to provide a high speed memory for instructions or data that have been recently, or are frequently, used by processor 1402. The processor 1402 is connected to a north bridge 1406 by a processor bus 1408. The north bridge 1406 is connected to random access memory (RAM) 1410 by a memory bus 1412 and manages access to the RAM 1410 by the processor 1402. The north bridge 1406 is also connected to a south bridge 1414 by a chipset bus 1416. The south bridge 1414 is, in turn, connected to a peripheral bus 1418. The peripheral bus can be, for example, PCI, PCI-X, PCI Express, or other peripheral bus. The north bridge and south bridge are often referred to as a processor chipset and manage data transfer between the processor, RAM, and peripheral components on the peripheral bus 1418. In some alternative architectures, the functionality of the north bridge can be incorporated into the processor instead of using a separate north bridge chip. In some aspects of the disclosure, system 100 can include an accelerator card 1422 attached to the peripheral bus 1418. The accelerator can include field programmable gate arrays (FPGAs) or other hardware for accelerating certain processing. For example, an accelerator can be used for adaptive data restructuring or to evaluate algebraic expressions used in extended set processing.

[0203] Software and data are stored in external storage 1424 and can be loaded into RAM 1410 and/or cache 1404 for use by the processor. The system 1400 includes an operating system for managing system resources; non-limiting examples of operating systems include: Linux, Windows™, MACOS™, BlackBerry OS™, iOS™, and other functionally-equivalent operating systems, as well as application software running on top of the operating system for managing data storage and optimization in accordance with example embodiments of the present disclosure.

[0204] In this example, system 1400 also includes network interface cards (NICs) 1420 and 1421 connected to the peripheral bus for providing network interfaces to external storage, such as Network Attached Storage (NAS) and other computer systems that can be used for distributed parallel processing.

[0205] FIG. 15 is a diagram showing a network 1500 with a plurality of computer systems 1502a, and 1502b, a plurality of cell phones and personal data assistants 1502c, and Network Attached Storage (NAS) 1504a, and 1504b. In example embodiments, systems 1502a, 1502b, and 1502c can manage data storage and optimize data access for data stored in Network Attached Storage (NAS) 1504a and 1504b. A mathematical model can be used for the data and be evaluated using distributed parallel processing across computer systems 1502a and 1502b and cell phone and personal data assistant systems 1502c. Computer systems 1502a, and 1502b, and cell phone and personal data assistant systems 1502c can also provide parallel processing for adaptive data restructuring of the data stored in Network Attached Storage (NAS) 1504a and 1504b. A wide variety of other computer architectures and systems can be used in conjunction with the various embodiments of the present disclosure. For example, a blade server can be used to provide parallel processing. Processor blades can be connected through a back plane to provide parallel processing. Storage can also be connected to the back plane or as Network Attached Storage (NAS) through a separate network interface.

[0206] In some example embodiments, processors can maintain separate memory spaces and transmit data through network interfaces, back plane or other connectors for parallel processing by other processors. In other embodiments, some or all of the processors can use a shared virtual address memory space.

[0207] FIG. 16 is a block diagram of a multiprocessor computer system 1600 using a shared virtual address memory space in accordance with an example embodiment. The system includes a plurality of processors 1602a-f that can access a shared memory subsystem 1604. The system incorporates a plurality of programmable hardware memory algorithm processors (MAPs) 160 FIG. 7-fin the memory subsystem 1604. Each MAP 1606a-f can comprise a memory 1608a-f and one or more field programmable gate arrays (FPGAs) 1610a-f. The MAP provides a configurable functional unit and particular algorithms or portions of algorithms can be provided to the FPGAs 1610a-f for processing in close coordination with a respective processor. For example, the MAPs can be used to evaluate algebraic expressions regarding the data model and to perform adaptive data restructuring in example embodiments. In this example, each MAP is globally accessible by all of the processors for these purposes. In one configuration, each MAP can use Direct Memory Access (DMA) to access an associated memory 1608a-f, allowing it to execute tasks independently of, and asynchronously from, the respective microprocessor 1602a-f. In this configuration, a MAP can feed results directly to another MAP for pipelining and parallel execution of algorithms. The disclosure envisions a computer-readable storage medium for example, a CD-ROM, memory key, flash memory card, diskette or other tangible medium having stored thereon a program which, when executed in a computing environment, provides for implementation of custom algorithms to carry out all or a portion of the results of a predictive likelihood or assessment of the provided biological sample as described by the methods of the disclosure. In various embodiments, the computer-readable storage medium is non-transitory.

[0208] The systems and methods of the invention integrate one or more pieces of laboratory equipment.

[0209] In some embodiments, the integration is performed at a Laboratory Information Management System (LIMS) or lower level. A computer system, may run multiple pieces of laboratory equipment. Software and hardware for laboratory applications may be integrated using the methods and systems of the invention. In various embodiments, similar components with shared functions are repeated in multiple pieces of laboratory equipment.

[0210] Computer systems may control multiple components in various pieces of equipment, thus creating new combination of available components. In another example, computer systems of the invention can control mass spectrometry, plate handling, liquid chromatographers, by controlling pumps, sensors, or other components within this piece of laboratory equipment. Software can be provided by anyone, including an independent laboratory end user or any other suitable user. Uses of LIMS in integrated laboratory systems are further described in U.S. Pat. No. 7,991,560, which is herein incorporated by reference in its entirety.

[0211] In aspects where the kit provides the computer-readable medium it will contain a complete program for carrying out the methods of the disclosure. The program includes program instructions for collecting, analyzing and generating output, and generally includes computer readable code and devices for interacting with a user as described herein, processing that data in conjunction with analytical information, and generating unique printed or electronic media for that user.

[0212] In other aspects the kit provides limited computer-readable medium that runs only portions of the methods of the disclosure. In this aspect the kit provides a program which provides data input from the user and for transmission of data input by the user (e.g., via the internet, via an intranet, etc.) to a computing environment at a remote site such as a server, on which the custom mathematical algorithms of the disclosure will be conducted. Processing or completion of processing of the data provided by the user is carried out at the remote site and the server will also function to generate a report. After review of the report, and completion of any needed manual intervention to provide a complete report, the complete report is then transmitted back to the user as an electronic report or printed report.

[0213] The storage medium containing a program according to the disclosure can be packaged with instructions for program installation and use or a web address where such instructions may be obtained.

### VII. Reports

[0214] When the methods of the disclosure are used for commercial diagnostic purposes such as in the medical field, generally a report or summary of information obtained from the methods will be generated.

[0215] A report or summary of the methods may include information concerning expression levels of one or more genes or proteins, classification of the polyp or tumor, the patient's risk level, such as high, medium or low, the patient's prognosis, treatment options, treatment recommendations, biomarker expression and how biomarker levels were determined, biomarker profile, clinical and pathologic factors, and/or other standard clinical information of the patients or of a population group relevant to the patient's disease state.

[0216] The methods and reports can stored in a database. The method can create a record in a database for the subject and populate the record with data. The report may be a paper report, an auditory report, or an electronic record. The report may be displayed and/or stored on a computing device (e.g., handheld device, desktop computer, smart device, website, etc.). It is contemplated that the report is provided to a physician and/or the patient. The receiving of the report can further include establishing a network connection to a server computer that includes the data and report and requesting the data and report from the server computer.

[0217] In another aspect the present disclosure provides methods of producing reports that include biomarker information about a biological sample obtained from a subject that includes the steps of determining sample's biomarker profile expression levels of the one or more biomarkers: SCDC26 (CD26), CEA molecule 5 (CEACAM5), CA195 (CCR5), CA19-9, M2PK (PKM2), TIMP1, P-selectin (SELPLG), VEGFA, HcGB (CGB), VILLIN, TATI (SPINK1), A-L-fucosidase (FUCA2), ANXA5, GAPDH, PKM2, ANXA4, GARS, RRBP1, KRT8, SYNCRIP, S100A9, ANXA3, CAPG, HNRNPF, PPA1, NME1, PSME3, AHCY, TPT1, HSPB1, and RPSA, and/or the proteins in FIG. 9, or their modified version or one of their binding partners and creating a report summarizing said their expression levels. In some aspects the report may further include a classification of a subject into a risk group such as “low-risk”, “medium-risk”, or “high-risk”. In various embodiments, groupings of two, three, four, five, six, seven, eight, nine, ten, eleven, and all twelve of the above proteins are included. Such groupings may exclude additional proteins, or may further comprise additional proteins.

[0218] In one aspect of the method, if increased expression of one or more biomarkers: SCDC26 (CD26), CEA molecule 5 (CEACAM5), CA195 (CCR5), CA19-9, M2PK (PKM2), TIMP1, P-selectin (SELPLG), VEGFA, HcGB (CGB), VILLIN, TATI (SPINK1), A-L-fucosidase (FUCA2), ANXA5, GAPDH, PKM2, ANXA4, GARS, RRBP1, KRT8, SYNCRIP, S100A9, ANXA3, CAPG, HNRNPF, PPA1, NME1, PSME3, AHCY, TPT1, HSPB1, and RPSA, and/or the proteins in FIG. 9 or their modified version or one of their binding partners, is determined, said report includes a prediction that said subject has an increased likelihood of having a colon polyp. In various embodiments, groupings of two, three, four, five, six, seven, eight, nine, ten, eleven, and all twelve of the above proteins are included. Such groupings may exclude additional proteins, or may further comprise additional proteins.

[0219] In another aspect of the method, if increased expression of one or more biomarkers: SCDC26 (CD26), CEA molecule 5(CEACAM5), CA195 (CCR5), CA19-9, M2PK (PKM2), TIMP1, P-selectin (SELPLG), VEGFA, HcGB (CGB), VILLIN, TATI (SPINK1), A-L-fucosidase (FUCA2), ANXA5, GAPDH, PKM2, ANXA4, GARS, RRBP1, KRT8, SYNCRIP, S100A9, ANXA3, CAPG, HNRNPF, PPA1, NME1, PSME3, AHCY, TPT1, HSPB1, and RPSA, and/or the proteins in FIG. 9 or their modified version or one of their binding partners, is determined, said report includes a prediction that said subject has an decreased likelihood of having a colon polyp. In various embodiments, groupings of two, three, four, five, six, seven, eight, nine, ten, eleven, and all twelve of the above proteins are included. Such groupings may exclude additional proteins, or may further comprise additional proteins.

[0220] In one aspect the report includes information to support a treatment recommendation for said patient. For example, the information can include a recommendation for ordering one or more, diagnostic tests, colonoscopy, surgery, therapeutic treatments and taking no further medical action, a likelihood of benefit score from such treatments, or other such data. In some embodiments, the report further includes a recommendation for a treatment modality for said patient

[0221] In one aspect of the disclosure the report is in paper form. In one aspect of the disclosure the report is electronic form such a CD-ROM, flash drive, other electronic storage devices known in the art. In another aspect of the disclosure the electronic report is downloaded from a wired or wireless network to a secondary computer device such as laptop, mobile phone or tablet.

[0222] In one aspect the report indicates that if increased expression of one or more biomarkers: SCDC26 (CD26), CEA molecule 5 (CEACAM5), CA195 (CCR5), CA19-9, M2PK (PKM2), TIMP1, P-selectin (SELPLG), VEGFA, HcGB (CGB), VILLIN, TATI (SPINK1), A-L-fucosidase (FUCA2), ANXA5, GAPDH, PKM2, ANXA4, GARS, RRBP1, KRT8, SYNCRIP, S100A9, ANXA3, CAPG, HNRNPF, PPA1, NME1, PSME3, AHCY, TPT1, HSPB1, and RPSA, and/or the proteins in FIG. 9 or their modified version or one of their binding partners, is determined, the report includes a prediction that said subject has an increased likelihood of recurrence of colon polyp or tumor at 5-10 years. In various embodiments, groupings of two, three, four, five, six, seven, eight, nine, ten, eleven, and all twelve of the above proteins are included. Such groupings may exclude additional proteins, or may further comprise additional proteins.

[0223] In another aspect the report indicates that if increased expression of one or more one or more of or biomarkers: SCDC26 (CD26), CEA molecule 5 (CEACAM5), CA195 (CCR5), CA19-9, M2PK (PKM2), TIMP1, P-selectin (SELPLG), VEGFA, HcGB (CGB), VILLIN, TATI (SPINK1), A-L-fucosidase (FUCA2), ANXA5, GAPDH, PKM2, ANXA4, GARS, RRBP1, KRT8, SYNCRIP, S100A9, ANXA3, CAPG, HNRNPF, PPA1, NME1, PSME3, AHCY, TPT1, HSPB1, and RPSA, and/or the proteins in FIG. 9 or their modified version or one of their binding partners, is determined, the report includes a prediction that said subject has a decreased likelihood colon polyp or tumor recurrence at 5-10 years. In various embodiments, groupings of two, three, four, five, six, seven, eight, nine, ten, eleven, and all twelve of the above proteins are included. Such groupings may exclude additional proteins, or may further comprise additional proteins.

[0224] In some aspects of the disclosure, the report further includes a recommendation for a treatment modality for said patient for treatment management of colon disease. Treatment management options can include but are not limited to, other diagnostic tests such as, colonoscopy, flex sigmoidscopy, CT colonography, stool test, fecal test, further treatment by a therapeutic agent, surgery intervention, and taking no further action.

[0225] The present disclosure also provides methods of preparing a personal biomarker profile for a patient by a) determining the normalized expression levels of at least one or more of the SCDC26 (CD26), CEA molecule 5 (CEACAM5), CA195 (CCR5), CA19-9, M2PK (PKM2), TIMP1, P-selectin (SELPLG), VEGFA, HcGB (CGB), VILLIN, TATI (SPINK1), A-L-fucosidase (FUCA2), ANXA5, GAPDH, PKM2, ANXA4, GARS, RRBP1, KRT8, SYNCRIP, S100A9, ANXA3, CAPG, HNRNPF, PPA1, NME1, PSME3, AHCY, TPT1, HSPB1, and RPSA, and/or the proteins in FIG. 9 or their modified version, or its expression product, in a biological sample obtained from a subject t; and (b) creating a report summarizing the data obtained by the gene expression analysis. In various embodiments, groupings of two, three, four, five, six, seven, eight, nine, ten, eleven, and all twelve of the above proteins are included. Such groupings may exclude additional proteins, or may further comprise additional proteins.

### VIII. Kits

[0226] The materials for use in the methods of the present disclosure are suited for preparation of kits produced in accordance with well known procedures. The kits provided by the present disclosure marketed to health care providers, including physicians, clinical laboratory scientists, nurses, pharmacists, formulary official or directly to the consumer.

[0227] Kits can often comprise insert materials, compositions, reagents, device components, and instructions on how to perform the methods or test on a particular biological sample type. The kits can further comprise reagents to enable the detection of biomarker by various assays types such as ELISA assay, immunoassay, protein chip or microarray, DNA/RNA chip or microarray, RT-PCR, nucleic acid sequencing, mass spectrometry, immunohistochemistry, flow cytometry, or high content cell screening.

[0228] The present disclosure provides for compositions such as binding agents capable of specifically binding to any one or more the biomarkers, peptides, polypeptides or proteins and fragments thereof as taught herein. Binding agents may include an antibody, aptamer, photoaptamer, protein, peptide, peptidomimetic or a small molecule. Binding agent provide by the present disclosure include both specific-binding agents that act by binding to one or more desired molecules or analytes, such as to one or more proteins, polypeptides or peptides of interest or fragments thereof substantially to the exclusion of other molecules which are random or unrelated, and optionally substantially to the exclusion of other molecules that are structurally similar or related. The term “specifically bind” does not necessarily require that an agent binds exclusively to its intended target(s). For example, an agent may be said to specifically bind to protein(s) polypeptide(s), peptide(s) and/or fragment(s) thereof of interest if its affinity for such intended target(s) under the conditions of binding is at least about 2-fold greater, preferably at least about 5-fold greater, more preferably at least about 10-fold greater, yet more preferably at least about 25-fold greater, still more preferably at least about 50-fold greater, and even more preferably at least about 100-fold or more greater, than its affinity for a non-target molecule.

[0229] Preferably, the binding agent may bind to its intended target(s) with affinity constant (KA) of such binding KA 1×106 M−1, more preferably KA 1×107 M−1, yet more preferably KA 1×108 M−1, even more preferably KA 1×109 M−1, and still more preferably KA 1×101° M−1 or KA 1×1011 M−1, wherein KA=[SBA_T]/[SBA][1], SBA denotes the specific-binding agent, T denotes the intended target. Determination of KA can be carried out by methods known in the art, such as for example, using equilibrium dialysis and Scatchard plot analysis.

[0230] In some applications of the methods and kits the binding agent will be an immunologic binding agent, such as an antibody. Examples of antibodies that can be used with the present disclosure include polyclonal and monoclonal antibodies as well as fragments thereof are well known in the art. Additional examples of antibodies that can be used this is methods and kit of the present disclosure include multivalent (e.g., 2-, 3- or more-valent) and/or multi-specific antibodies (e.g., bi- or more-specific antibodies) formed from at least two intact antibodies, and antibody fragments insofar they exhibit the desired biological activity (particularly, ability to specifically bind an antigen of interest), as well as multivalent and/or multi-specific composites of such fragments.

[0231] An antibody may be any of IgA, IgD, IgE, IgG and IgM classes, and preferably IgG class antibody. An antibody may be a polyclonal antibody, e.g., an antiserum or immunoglobulins purified there from (e.g., affinity-purified). An antibody may be a monoclonal antibody or a mixture of monoclonal antibodies. Monoclonal antibodies can target a particular antigen or a particular epitope within an antigen with greater selectivity and reproducibility. By means of example and not limitation, monoclonal antibodies may be made by the hybridoma method first described by Kohler et al. 1975 (Nature 256: 495), or may be made by recombinant DNA methods (e.g., as in U.S. Pat. No. 4,816,567). Monoclonal antibodies may also be isolated from phage antibody libraries using techniques as described by Clackson et al. 1991 (Nature 352: 624-628) and Marks et al. 1991 MolBiol 222: 581-597), for example.

[0232] Antibody binding agents may be antibody fragments. “Antibody fragments” comprise a portion of an intact antibody, comprising the antigen-binding or variable region thereof. Examples of antibody fragments include Fab, Fab′, F(ab′)2, Fv and scFv fragments; diabodies; linear antibodies; single-chain antibody molecules; and multivalent and/or multispecific antibodies formed from antibody fragment(s), e.g., dibodies, tribodies, and multibodies. The above designations Fab, Fab′, F(ab′)2, Fv, scFv etc. are intended to have their art-established meaning

[0233] Methods of producing polyclonal and monoclonal antibodies as well as fragments thereof are well known in the art, as are methods to produce recombinant antibodies or fragments thereof (see for example, Harlow and Lane, “Antibodies: A Laboratory Manual”, Cold Spring Harbour Laboratory, New York, 1988; Harlow and Lane, “Using Antibodies: A Laboratory Manual”, Cold Spring Harbour Laboratory, New York, 1999, ISBN 0879695447; “Monoclonal Antibodies: A Manual of Techniques”, by Zola, ed., CRC Press 1987, ISBN 0849364760; “Monoclonal Antibodies: A Practical Approach”, by Dean & Shepherd, eds., Oxford University Press 2000, ISBN 0199637229; Methods in Molecular Biology, vol. 248: “Antibody Engineering: Methods and Protocols”, Lo, ed., Humana Press 2004, ISBN 1588290921).

[0234] Antibodies of the present disclosure can originate from or comprising one or more portions derived from any animal species, preferably vertebrate species, including, e.g., birds and mammals. Without limitation, the antibodies may be chicken, chicken egg, turkey, goose, duck, guinea fowl, quail or pheasant. Also without limitation, the antibodies may be human, murine (e.g., mouse, rat, etc.), donkey, rabbit, goat, sheep, guinea pig, camel (e.g., Camelus bactrianus and Camelus dromaderius), llama (e.g., Lama paccos, Lama glama or Lama vicugna) or horse.

[0235] The disclosure also provided for an antibody to the biomarkers provided herein may include one or more amino acid deletions, additions and/or substitutions (e.g., conservative substitutions), insofar such alterations preserve its binding of the respective antigen. An antibody may also include one or more native or artificial modifications of its constituent amino acid residues (e.g., glycosylation, etc.).

[0236] The antibodies provide by the present disclosure are not limited to antibodies generated by methods comprising immunization but also includes any polypeptide, e.g., a recombinantly expressed polypeptide, which is made to encompass at least one complementarity-determining region (CDR) capable of specifically binding to an epitope on an antigen of interest. Hence, the terms antibody or immunologic binding agent applies to such molecules regardless whether they are produced in vitro or in vivo.

[0237] Antibody or immunologic binding agents, peptides, polypeptides, proteins, biomarkers etc. in the present kits may be in various forms, e.g., lyophilised, free in solution or immobilised on a solid phase. Antibody or immunologic binding agents may be, e.g., provided in a multi-well plate or as an array or microarray, or they may be packaged separately and/or individually. The may be suitably labeled to detection as taught herein. Kits provide herein may be particularly suitable for performing the assay methods of the disclosure, such as, e.g., immunoassays, ELISA assays, mass spectrometry assays, flow cytometry and the like.

[0238] In disclosure provide for kits to be delivered and used by qualified clinical scientists. In such kit the disclosure provides for kits comprised of various agents, which may include antibodies read-out detection antibodies that recognized of one or more of the disclosed biomarkers, gene-specific or gene-selective probes and/or primers, for quantitating the expression of one or more of the disclosed biomarkers, modified form or binding partners of the biomarker for predicting colon tumor status or response to treatment.

[0239] The kits may be further comprised of containers (including microtiter plates suitable for use in an automated implementation of the method), pre-fabricated biochips, buffers, the appropriate regents antibodies, probes, enzymes to conduct the assay. In some aspects of the disclosure kits may contain reagents for the extraction of protein and nucleic acid from biological samples, and/or reagents for DNA or RNA amplification or protein fractionation or purification and a capture biochip that detects the biomarkers The reagent(s) in the kit will have with an identifying description or label or instructions relating to their use and steps to conduct the assay. In addition, the kits can be further comprised of instructions relating to their use in the methods used to determine the likelihood of colon polyp/tumor status and recurrence and treatment response or a computer-readable storage medium can also be provided in combination to determine the likelihood of colon polyp/tumor status and recurrence and treatment response.

[0240] A kit can further comprise a software package for data analysis which can include reference biomarker profiles for comparison. In some applications, the kits' software package including connection to a central server to conduct for data analysis and where a report with recommendation on disease state, treatment suggestions, or recommendation for treatments or procedures for disease management.

[0241] The report provide with the kit can be a paper or electronic report. It can be generated by computer software provided with the kit, or by a computer sever which the user uploads to a website wherein the computer server generates the report.

[0242] In some aspects of the disclosure kits may contain mathematical algorithms used to estimate or quantify prognostic, diagnostic, clinical status, or predictive information as components of kits. In some aspects this will delivered though computer-readable storage media and other aspects of the disclosure this might be given by supplying the user with a password to access a computer server containing the logic to run the mathematical algorithms.

[0243] The kit can be packaged in any suitable manner, typically with all elements in a single container along with a sheet of printed instructions for carrying out the method or test.

[0244] In disclosure provide for kits to be delivered to a physician. The kit for this purpose would in include an electronic or written document for the physician to provide medical information and bar-code labels to adhere to sterile receptacle containers containing the biological samples and optional fixative/preservative regents. In some aspects such a kit will include mailing instruction and supplies to be sent by mail for processing by the methods provided herein.

### EXAMPLES

### Example 1

### Identification of Adenoma or Polyp Status in Individuals with Negative Diagnosis from Colonoscopy

[0245] Whole serum from patients with a negative diagnosis of adenoma or polyps based on colonoscopy is tested for the presence of absence of colon polyps using the validated biomarker classifier. Data is analyzed from each site's samples independently (i.e., the validation data set is not used for training or testing in discovery cross-validation) and then is evaluated for overlap between the results. LC-MS/MS analysis is performed on proteins and/or peptides of the classifier in TABLE E1.

[0246] Biomarkers are identified. For example, biomarker collections are shown in TABLE E1 and TABLE E2, and FIG. 7.

TABLE E1

| No. | Name (alternative name) | |
|---|---|---|
| 1 | SCDC26 (CD26) | Dipeptidyl peptidase 4 soluble form |
| 2 | CEA molecule 5 | Carcinoembryonic anitigen-related |
| | (CEACAM5) | adhesion |
| 3 | CA195 (CCR5) | C-C chemokine receptor type 5 |
| 4 | CA19-9 | carbohydrate antigen 19-9 |
| 5 | M2PK (PKM2) | Pyruvate kinase isozymes M1/M2 |
| 6 | TIMP1 | Metalloproteinase inhibitor 1 |
| 7 | P-selectin (SELPLG) | P-selectin glycoprotein ligand 1 |
| 8 | VEGFA | Vascular endothelial growth factor A |
| 9 | HcGB (CGB) | Choriogonadotropin subunit beta |
| 10 | VILLIN | Epithelial cell-specific |
| | | Ca2+-regulated actin |
| 11 | TATI (SPINK1) | Pancreatic secretory tyrpsin inhibitor |
| 12 | A-L-fucosidase (FUCA2) | Plasma alpha-L-fucosidase |

TABLE E2

| | Name | |
|---|---|---|
| No. | (alternative name) | |
| 1 | ANXA5 | Annexin A5 |
| 2 | GAPDH | Glyceraldehyde-3-phosphate dehydrogenase |
| 3 | PKM2 | Pyruvate kinase isozymes M1/M2 |
| 4 | ANXA4 | Annexin A4 |
| 5 | GARS | Glycyl-tRNA synthetase |
| 6 | RRBP1 | Ribosome-binding protein 1 |
| 7 | KRT8 | Keratin, type II cytoskeletal 8 |
| 8 | SYNCRIP | Heterogeneous nuclear ribonucleoprotein Q |
| 9 | S100A9 | S100 A9 Calcium binding protein |
| 10 | ANXA3 | Annexin A3 |
| 11 | CAPG | Macrophage-capping protein |
| 12 | HNRNPF | Heterogeneous nuclear ribonucleoprotein F |
| 13 | PPA1 | Inorganic pyrophosphatase |
| 14 | NME1 | Nucleoside diphosphate kinase A |
| 15 | PSME3 | Proteasome activator complex subunit 3 |
| 16 | AHCY | Adenosylhomocysteinase |
| 17 | TPT1 | Translationally-controlled tumor protein |
| 18 | HSPB1 | Heat shock protein beta-1 |
| 19 | RPSA | 40S ribosomal protein SA |

[0247] These values are compared to a control reference value. Finally, the classifier profile is compared to low or no-risk, medium-risk and high-risk classifier profiles, allowing the patient sample to be correlated to the subject's predicted adenoma/polyp status or normal at around 90% or better accuracy rate. See TABLE E3. Alternatively, the clinical test is performed using the biomarker classifier by immunological analysis such as immunoblotting, biochip, immunostaining and/or flow cytometry analysis.

TABLE E3

| | |
|---|---|
| Validation Set | Discovery Set |

| | Normal | Polyps | Normal | Polyps |
|---|---|---|---|---|
| | n = 500 | n = 600 | n = 400 | n = 700 |
| Classified as | 461 | 0 | 387 | 0 |
| normal (non- | | | | |
| polyp) | | | | |
| Classified as | 0 | 543 | 0 | 673 |
| with polyp | | | | |
| Cannot classify | 39 | 57 | 13 | 27 |

### Example 2

### Identification of Recurrence of a Polyp Status in Individuals Who Previously Presented with Colon Polyps

[0248] A capture biochip with antibodies that specifically bind to or recognize antigens to the protein biomarker classifier in TABLE E1 and/or TABLE E2 and control references is used to profile antigens in whole serum samples from patients who have presented earlier with a colon polyp tumor.

[0249] Samples are screened to determine if the patients had recurrence of a colon polyp or polyp. The chip is incubated with the sample at room temperature to allow antibodies to form a complex of with the antigens in the sample. Next, the chip is washed with a mild detergent solution to remove any proteins or antibodies that are not specifically bound. A secondary antibody-complex with a detection reagent is added and allowed to bind the chip, and is washed with a mild detergent. Proteins are quantified using a reader such as a CCD camera. Finally, the classifier profile from the biochip read-out is to compared to low or no-risk, medium-risk and high-risk recurrence classifiers profiles to determine the patient's recurrence status.

### Example 3A

[0250] In this study, blood was collected from patients who were about to undergo colonoscopy. Quantitative data on the profiles of protein-based molecular features present in plasma were collected using a tandem mass spectrometry-based process, and the data were used to identify features that comprise classifiers with the ability to predict the outcome of the colonoscopy procedure.

[0251] Study Design and Patient Sample Collection

[0252] In order to correlate plasma protein profiles with patient colonoscopy outcomes, blood samples were collected from patients presenting for colonoscopies on the day of their procedures. Inclusion criteria required that the patient be equal to or greater than 18 years of age and be willing and able to sign an informed consent. This was an “all comers” study in which patients could be undergoing the procedure as a recommended, routine screen, as a precaution due to prior personal or family history, or as a follow up to personal health symptoms.

[0253] After the routine preparation for colonoscopy that included overnight fasting, liquid-type constraints, and bowel prep to remove fecal matter, a blood sample was drawn into a plasma collection device that included EDTA as an anti-coagulant. The blood sample was mixed, centrifuged to separate plasma as per the manufacturer's instructions, and the separated plasma was collected and frozen at −80 C within four hours.

[0254] In addition to the plasma sample, patient clinical data such as age, weight, gender, ethnicity, current medications and indications, and personal and family health history were collected as were the colonoscopy procedure report and the pathology report on any collected and examined tissues. More than 500 patient samples were collected. Patient demographic data is provided in TABLE E4, TABLE E5, and TABLE E6.

TABLE E4

| | | | Disease | | | | |
|---|---|---|---|---|---|---|---|
| | | Control | | Adenoma | | | |
| | Excluded | Normal | Polyp | and Polyp | Adenoma | Total | % Total |
| Total | 3 | 73 | 20 | 7 | 49 | 152 | 100.00% |
| Routine Visit | 0 | 37 | 6 | 1 | 22 | 66 | 43.42% |
| History | 0 | 14 | 10 | 5 | 15 | 44 | 28.95% |
| Symptoms | 3 | 22 | 4 | 1 | 12 | 42 | 27.63% |
| Prior Colonoscopy | 1 | 41 | 13 | 6 | 25 | 86 | 56.58% |
| Male | 2 | 35 | 8 | 4 | 27 | 76 | 50.00% |
| Female | 1 | 38 | 12 | 3 | 22 | 76 | 50.00% |
| African American | 1 | 3 | 2 | 0 | 2 | 8 | 5.26% |
| Asian | 0 | 0 | 0 | 1 | 0 | 1 | 0.66% |
| Caucasian | 2 | 69 | 16 | 6 | 45 | 138 | 90.79% |
| Hispanic | 0 | 1 | 1 | 0 | 2 | 4 | 2.63% |
| Indian | 0 | 0 | 1 | 0 | 0 | 1 | 0.66% |
| Pacific Islander | 0 | 0 | 0 | 0 | 0 | 0 | 0.00% |

TABLE E5

| | Control | Disease |
|---|---|---|
| Female | 38 | 37 |
| Mail | 35 | 39 |
| | | p = 0.6808 |
| Age | 58.8 +/− 9.8 | 58.9 +/− 9.6 |
| (average +/− stdev in years) | | |
| | | p = 0.9305 |
| Routine | 37 | 29 |
| History or symptoms | 36 | 47 |
| | | p = 0.1237 |

p-values from Chi-squared tests of association

TABLE E6

| | # in | | | | | Chi |
|---|---|---|---|---|---|---|
| | Training | Control | Control | Disease | Disease | Squared |
| Condition or Medication | Set | with | without | with | without | p-value |
| Allergies | 27 | 15 | 58 | 12 | 64 | 0.450942 |
| Anemia | 10 | 6 | 67 | 4 | 72 | 0.470814 |
| AnxietyDisorder | 13 | 8 | 65 | 5 | 71 | 0.343321 |
| Arthritis | 13 | 6 | 67 | 7 | 69 | 0.830237 |
| Asthma | 16 | 5 | 68 | 10 | 66 | 0.199724 |
| Constipation | 12 | 4 | 69 | 7 | 69 | 0.383146 |
| Depression | 32 | 19 | 54 | 13 | 63 | 0.184788 |
| DiabetesTypeII | 25 | 8 | 65 | 15 | 61 | 0.137476 |
| DiverticularDisease | 13 | 8 | 65 | 5 | 71 | 0.343321 |
| GastroesophagealRefluxDisease(GERD) | 36 | 13 | 60 | 22 | 54 | 0.108432 |
| Hypercholesterolemia | 22 | 11 | 62 | 11 | 65 | 0.918512 |
| HyperlipidemiaDyslipidemia | 45 | 16 | 57 | 27 | 49 | 0.066549 |
| Hypertension | 64 | 29 | 44 | 34 | 42 | 0.535918 |
| Hypothyroidism | 21 | 8 | 65 | 13 | 63 | 0.280525 |
| Insomnia | 13 | 8 | 65 | 5 | 71 | 0.343321 |
| IrritableBowelSyndrome(IBS) | 17 | 10 | 63 | 7 | 69 | 0.388888 |
| HCTZHydrochlorothiazide | 14 | 7 | 66 | 6 | 70 | 0.714104 |
| ASAAspirin | 45 | 20 | 53 | 24 | 52 | 0.575854 |
| Albuterol | 12 | 5 | 68 | 7 | 69 | 0.596230 |
| CalicumSupplement | 26 | 10 | 63 | 16 | 60 | 0.236565 |
| FishOil | 23 | 11 | 62 | 12 | 64 | 0.903077 |
| Flovent | 15 | 9 | 64 | 6 | 70 | 0.368360 |
| HormoneReplacementTherapy | 14 | 10 | 63 | 4 | 72 | 0.076930 |
| Ibuprofen | 11 | 6 | 67 | 5 | 71 | 0.701900 |
| Levathyroxine | 18 | 7 | 66 | 11 | 65 | 0.359898 |
| Lipitor | 12 | 4 | 69 | 8 | 68 | 0.256630 |
| Lisinopril | 17 | 4 | 69 | 12 | 64 | 0.041113 |
| Metformin | 14 | 4 | 69 | 9 | 67 | 0.167563 |
| Pravachol | 11 | 3 | 70 | 8 | 68 | 0.132598 |
| Prilosec | 27 | 12 | 61 | 15 | 61 | 0.601195 |
| VitaminC | 12 | 5 | 68 | 7 | 69 | 0.596230 |
| VitaminD | 25 | 11 | 62 | 13 | 63 | 0.735244 |
| VitaminD3 | 10 | 3 | 70 | 7 | 69 | 0.211955 |
| Zocor | 18 | 7 | 66 | 10 | 66 | 0.493048 |

[0255] Sample Preparation for Plasma Protein Analysis

[0256] 152 samples (76 polyp and/or adenoma and 76 control) were selected for classifier analysis. The polyp and/or adenoma group of patients was randomly selected from the larger study cohort and matched for age and gender from controls. Patient plasma protein samples were prepared for LCMS measurement as follows. Plasma samples were thawed from −80 C storage and lipids and particulates were removed by filter centrifugation. The high-abundance proteins in the filtered plasma were removed by immunoaffinity column-based depletion. The lower abundance, flow-through proteins were separated into fractions by reverse-phase HPLC. Selected protein fractions, six per sample, were reduced to peptides by trypsin-TFE digestion, and the resulting peptides were re-suspended in acetonitrile/formic acid LCMS loading buffer.

[0257] LCMS Data Acquisition and Protein Molecular Feature Quantification

[0258] Re-suspended peptides from several fractions of each patient's plasma sample were injected via UHPLC into a tandem mass spectrometer (Q-TOF) for quantitative analysis. The collected data (retention time, mass/charge ratio, and ion abundance) were analyzed to detect observed peaks referred to as molecular features. A three-dimensional peak integration algorithm determined the relative abundance of the molecular features.

[0259] Molecular feature data from multiple patient samples were compared after dataset overlay and alignment using a cubic spline algorithm. Only the features determined to be present in 50% or more of at least one of the patient classes (clean or polyp/adenoma) were considered for further analysis. In the case of missing patient-feature data in this set, feature values were imputed by integrating the raw ion abundance data in the a priori location of the peak as observed in other samples. More than 145,000 molecular features from each of the 152 patient samples comprised the final data set for subsequent classifier analysis.

[0260] Data Normalization, Feature Selection and Classifier Assembly

[0261] The quantitative data for distinct molecular features derived from a single original neutral mass were combined and summarized. For example, +2 m/z and +3 m/z features from the same parent molecule were combined by summing to a single neutral mass cluster (NMC) value.

[0262] Molecular feature data from different samples were normalized by mean adjusting NMCs from samples collected on the same instrument and day of the study. Data acquisition was balanced such that approximately equal numbers of clean and polyp/adenoma samples were evaluated in each instrument-day group. This method is defined as cluster-instrument-day (“CID”) normalization.

[0263] Initial analysis of the data suggested that an imbalance in the hormone-replacement therapy status of the female samples might be a confounding factor in classifier building. To eliminate that possibility, molecular features that were suggested to be HRT-related were identified by differential classifier assembly and removed from subsequent analysis.

[0264] Only samples with complete data from all experimental fractions were used for analysis. Of the 152 samples originally, measured, 108 complete samples remained. For most of the excluded samples, the QC failure of one or more of the 6 sample fractions resulted in the exclusion.

[0265] Using the final, normalized data, classifiers were created and evaluated for their ability to discriminate the clean patient samples from the polyp and/or adenoma samples. In each of fifty 70/30, training/test splits of the sample data, an elastic-net approach was used for feature selection, reducing the number of considered NMCs from more than 100,000 to approximately 200-250. These selected NMCs were then used to build SVM(sigmoid-kernel)-based classifiers. Within each iteration of the fifty training/test splits, the classifier's performance was determined on the test data as measured by AUC on ROC plots (a combined measure of sensitivity and specificity). The average AUC that resulted, 0.79+/−0.08, is shown in FIG. 1A. This AUC is significantly different from 0.5, the value that a random assay with no discriminatory power would achieve, according to the dashed line bisecting the figure. Thus, FIG. 1A provides a comparison of the testing set performance. The X-axis represents the false positive rate. The Y-axis represents the true positive rate.

[0266] In order to confirm the robustness of the elastic-net/SVM classifier performance, the class assignments, polyp/adenoma vs. clean, were randomly permuted and the entire feature selection and classifier assembly process was performed again across fifty iterations. The resulting average AUC, 0.52+/−0.09, is shown in FIG. 2A and demonstrates that a result such as determined for the correct assignments was not likely to have arisen by chance. Thus, FIG. 2A provides a validation of the testing set performance. The X-axis represents the false positive rate. The Y-axis represents the true positive rate.

[0267] Another measure of the significance of the result is the tabulation of the frequency with which individual NMCs occur in the fifty 70/30 training/test split classifiers. In each iteration approx. 200-250 features are selected for a classifier; a feature's presence in at least 3 or more of the fifty iterations is a result not expected by chance. A pareto plot (ranked histogram) of the feature-frequency table is shown in FIG. 3. The data indicate that a large number of features are selected multiple times, suggesting robustness in their participation in discriminatory classifiers. When the most frequent features (ie., top 30 from distinct correlation groups) are selected and used to build classifiers within a nested 70(70/30)/30 analytical structure, the resulting average AUC is still significantly different than random. That result indicates that there are multiple classifiers which can be constructed from the selected feature set.

[0268] Subsets of Classifier Molecular Features

[0269] Smaller subsets of classifier features were identified by an outer loop/inner loop strategy. In this approach, the samples were divided into 50 outer loop 70/30 splits and 500 inner loop 70/30 splits. The multiple inner loops were performed for feature selection in that the SVM-classifier inner-test ROC AUC was calculated and the best 5% out of the 500 iterations were selected and the comprising features were retained. An Elastic Net was used to select a final group of features to build the outer loop SVM-classifier. For different sized classifiers, the frequency ranks for features from the selected inner loops were used to prioritize features (e.g., most frequent 10, 20, 30, etc.). The resulting classifier was evaluated on the outer loop test set and the performance AUC was measured. FIG. 5 shows the average ROC for the 50 outer loop iterations and demonstrates that a classifier of size 30 retained significant predictive value (AUC=0.645+/−0.092). In FIG. 5, the Y-axis shows the true positive rate, and the X-axis shows the false positive rate. As a confirmation that this result could not have been obtained by chance, the procedure was performed on 50 different sample sets in which the sample class assignments had been randomly re-assigned. The resulting AUC, 0.502+/−0.101, as shown in FIG. 6, was random thus confirming the robustness of the correct class assignment result. In FIG. 6, the Y-axis shows the true positive rate, and the X-axis shows the false positive rate. TABLE E7 shows that similar evidence of significant performance has been demonstrated with classifiers of size 10 features or NMCs.

TABLE E7

| Size | AUC | sd |
|---|---|---|
| 100 | 0.70 | 0.08 |
| 50 | 0.66 | 0.09 |
| 40 | 0.65 | 0.09 |
| 30 | 0.64 | 0.09 |
| 20 | 0.63 | 0.09 |
| 10 | 0.60 | 0.09 |

[0270] Identification of the Classifier Molecular Features

[0271] Mass determination of molecular features by mass spectrometry is sufficiently accurate and precise to provide unique identification. The masses of the 1014 features represented in the classifiers assembled in this Example, each present 3 or more times, are enumerated in the appended table as FIG. 7. The accurate mass is inherently uniquely identifying for a molecular feature, thus it is possible to determine the primary amino acid sequence and any post-translational modifications of these features in order to convert their measurement to an alternate presentation.

### Example 3B

[0272] Study design corresponded to the study design of Example 3A with the following additional details.

[0273] LCMS Data Acquisition and Protein Molecular Feature Quantification

[0274] Re-suspended peptides from several fractions of each patient's plasma sample were injected via UHPLC into a tandem mass spectrometer (Q-TOF) for quantitative analysis. The collected data (retention time, mass/charge ratio, and ion abundance) were analyzed to detect observed peaks referred to as molecular features. A three-dimensional peak integration algorithm determined the relative abundance of the molecular features. On average, approximately 364,000 molecular features were detected and quantified from each plasma sample.

[0275] Molecular feature data from multiple patient samples were compared after dataset overlay and alignment using a cubic spline algorithm. Only the features determined to be present in 50% or more of at least one of the patient classes (clean or polyp/adenoma) were considered for further analysis. In the case of missing patient-feature data in this set, feature values were imputed by integrating the raw ion abundance data in the a priori location of the peak as observed in other samples. Approximately 149,000 molecular features from each of the 152 patient samples comprised the final data set for subsequent classifier analysis.

[0276] Data Normalization, Feature Selection and Classifier Assembly

[0277] The quantitative data for distinct molecular features derived from a single original neutral mass were combined and summarized. For example, +2 m/z and +3 m/z features from the same parent molecule were combined by summing to a single neutral mass cluster (NMC) value. The total number of NMCs was approximately 105,000.

[0278] Details are as in Example 3A. Additionally, features were filtered by parameters used to indicate higher identification probability; For example, only features with charge state greater than 1 (z>1) were considered. This reduced the total number of NMCs used for classifier analysis to approximately 47,000.

[0279] Further to the analysis of Example 3A, in this analysis, ten rounds of 10-fold cross-validation were used to select features and build classifiers. In each, 90% of the data were used to select features using an Elastic Net algorithm with regression, the top 20 features were selected based on a ranking of the determined coefficients for the features, and then an SVM classifier with a linear kernel was constructed. This final classifier was then evaluated upon the 10% of samples held out in the test set of the given fold. Therefore, in each round of 10-fold cross validation, every sample is in the test set one and only one time. The predicted test set values from the classifier for each of the samples were used to construct a ROC plot for that round with one point for every sample. The ten ROC plots, one from each round, are averaged and plotted. For the 108 complete samples used in the analysis, and using the original colonoscopy determined diagnosis as the comparator, the median AUC for the 20 feature classifiers was 0.91. The mean AUC was 0.91±0.021. FIG. 1B.

[0280] In order to confirm the robustness of the classifier performance, the class assignments, polyp/adenoma vs. clean, were randomly permuted and the entire feature selection and classifier assembly process was performed again across ten rounds of 10-fold cross-validation as described herein. The median AUC of 0.52 and the mean AUC of 0.52±0.033 (FIG. 2B) demonstrated that a result such as determined for the correct assignments, AUC 0.91, was not likely to have arisen by chance.

[0281] Another measure of the significance of the result is the tabulation of the frequency with which individual NMCs occur in the 100 classifiers created in the ten rounds of 10-fold cross-validation. In each iteration twenty features were selected for a classifier; a feature's presence in multiple classifiers is indicative of the robustness of the feature selection and classifier process. Using the original diagnosis to build classifiers as seen in FIG. 1B, most features were selected more than once. The most frequently selected feature was chosen in 99 out of 100 classifiers. See FIG. 4. In contrast, using random feature selection, the most frequently selected feature was chosen only three times. In all, 206 features were present in one or more of the one hundred 20-feature classifiers.

[0282] Identification of the Classifier Molecular Features

[0283] Mass determination of molecular features by mass spectrometry is sufficiently accurate and precise to provide unique identification. The masses of the 206 features represented in the classifiers assembled in this example are enumerated in the appended table as FIG. 8. The accurate mass is inherently uniquely identifying for a molecular feature, thus it is possible to determine the primary amino acid sequence and any post-translational modifications of these features in order to convert their measurement to an alternate presentation.

### Example 4

### MRM Assay Development

[0284] Initially, 188 proteins previously reported as having association to colorectal cancer were interrogated in silico to reveal potential peptide candidates for targeted proteomics profiling. From ten-of-thousands of potential tryptic peptides, a preliminary set of 1056 was selected for experimental verification. A final set of 337 peptides, representing 187 proteins, was selected from experimental verification to comprise the final multiple reaction monitoring (MRM) assay. In addition, 337 complement peptides, of exact sequence composition labeled with heavy (all carbon 13) arginine (R) or lysine (K), were incorporated as internal standards, used in the final analysis as a normalization reference.

[0285] Sample Preparation for Plasma Protein Analysis

[0286] Patient plasma protein samples were prepared for MRM LCMS measurement according to two methods, referred to as dilute and deplete.

[0287] In the dilute method, plasma samples were thawed from −80 C storage and lipids and particulates were removed by filter centrifugation. Remaining proteins were reduced to peptides by trypsin-TFE digestion, and the resulting peptides were re-suspended in acetonitrile/formic acid MRM LCMS loading buffer.

[0288] In the deplete method, plasma samples were thawed from −80 C storage and lipids and particulates were removed by filter centrifugation. The high-abundance proteins in the filtered plasma were removed by immunoaffinity column-based depletion. The lower abundance, flow-through proteins were reduced to peptides by trypsin-TFE digestion, and the resulting peptides were re-suspended in acetonitrile/formic acid MRM LCMS loading buffer.

[0289] LCMS Data Acquisition and Transition Feature Quantification

[0290] Re-suspended peptides from each patient's plasma sample were injected via UHPLC into a triple quadrupole mass spectrometer (QQQ) for quantitative analysis. The collected data (retention time, precursor mass, fragment mass, and ion abundance) were analyzed to detect observed peaks referred to as transitions.

[0291] A two-dimensional peak integration algorithm was employed to determine the area under the curve (AUC) for each of the transition peaks.

[0292] Complement peptides of exact sequence composition labeled with heavy (all carbon 13) arginine (R) or lysine (K) were utilized as internal standards for each of the 676 targeted transitions. Transition AUC values were normalized with the compliment internal standard AUC value to derive a concentration value for each transition.

[0293] Data Normalization, Feature Selection and Classifier Assembly

[0294] For the classifier assembly and performance evaluation, feature concentration values were used based upon the ratio of the raw peptide peak area to the associated labeled standard peptide raw peak area. No normalization of the underlying raw peak areas was applied. Missing values for the transitions were set to 0.

[0295] Classifier models and the associated classification performance was assessed using a 10 by 10-fold cross validation process. In this process feature selection was first applied to reduce the number of features used, followed by development of classifier model and subsequent classification performance evaluation. For each of the 10-fold cross validations, the data were segregated into 10 splits each containing 90% of the samples as a training set, and the remaining 10% of the samples as a testing set. In this process each of the 95 total samples was evaluated one time in a test set. The feature selection and model assembly process was performed using the training set only, and these models were then applied to the testing set to evaluate classifier performance.

[0296] To further assess the generalization of the classification performance, this entire 10-fold cross validation procedure was repeated 10 times, each with a different sampling of training and testing sets.

[0297] The total number of transition features used for classifier analysis was 674. To explore the classification performance with few numbers of features, Elastic Network feature selection was applied prior to building the classification model. In this process, Elastic Network models were built and the model giving 20 transition features was used in the development of the classification model. Because each fold of the cross-fold validation process has its own feature selection step, different features may be selected with each fold, so the total number of features used in the models across the by 10-fold cross validation process will be greater-than-or-equal to 20.

After the feature selection step, a classifier model was built using the support vector machine (SVM) algorithm with a linear kernel. After construction of the classifier model on the training set, it was directly applied without modification to the testing set and the associated receiver operator characteristic (ROC) curve was generated from which the area under the curve (AUC) was computed. In the 10 by 10-fold cross validation process, a mean test set AUC of 0.76+/−0.035 was obtained FIG. 10 indicating the ability for the classification model to discriminate colorectal cancer and normal patient samples. To further assess the features selected during the feature selection process, a frequency/rank plot was produced FIG. 11. This plot shows several features that were selected in all or almost all of the cross validation fold, highlighting their utility in distinguishing colorectal cancer from normal samples. The list of features identified through the classification process are listed in FIG. 12.

### Study Design and Patient Sample Collection

| | Control | CRC Disease |
|---|---|---|
| Female | 24 | 23 |
| Male | 24 | 24 |
| | | p = 1 |
| Age | 65.0 +/− 9.7 | 65.5 +/− 9.6 |
| (mean +/− stdev in years) | | |
| | | p = 0.82 |

[0299] While preferred embodiments of the present disclosure have been shown and described herein, it will be obvious to those skilled in the art that such embodiments are provided by way of example only. Numerous variations, changes, and substitutions will now occur to those skilled in the art without departing from the disclosure. It should be understood that various alternatives to the embodiments of the disclosure described herein may be employed in practicing the disclosure. It is intended that the following claims define the scope of the disclosure and that methods and structures within the scope of these claims and their equivalents be covered thereby.

The application's sequence listing, which the Patent Office published only in electronic form, follows.

SEQUENCE LISTING (188 sequences)

SEQ ID NO: 1 - protein, 375 aa, Homo sapiens
MDDDIAALVVDNGSGMCKAGFAGDDAPRAVFPSIVGRPRHQGVMVGMGQKDSYVGDEAQSKRGILTLKYPIEHGIVTNWDDMEKIWHHTFYNELRVAPEEHPVLLTEAPLNPKANREKMTQIMFETFNTPAMYVAIQAVLSLYASGRTTGIVMDSGDGVTHTVPIYEGYALPHAILRLDLAGRDLTDYLMKILTERGYSFTTTAEREIVRDIKEKLCYVALDFEQEMATAASSSSLEKSYELPDGQVITIGNERFRCPEALFQPSFLGMESCGIHETTFNSIMKCDVDIRKDLYANTVLSGGTTMYPGIADRMQKEITALAPSTMKIKIIAPPERKYSVWIGGSILASLSTFQQMWISKQEYDESGPSIVHRKCF

SEQ ID NO: 2 - protein, 376 aa, Homo sapiens
MCEEETTALVCDNGSGLCKAGFAGDDAPRAVFPSIVGRPRHQGVMVGMGQKDSYVGDEAQSKRGILTLKYPIEHGIITNWDDMEKIWHHSFYNELRVAPEEHPTLLTEAPLNPKANREKMTQIMFETFNVPAMYVAIQAVLSLYASGRTTGIVLDSGDGVTHNVPIYEGYALPHAIMRLDLAGRDLTDYLMKILTERGYSFVTTAEREIVRDIKEKLCYVALDFENEMATAASSSSLEKSYELPDGQVITIGNERFRCPETLFQPSFIGMESAGIHETTYNSIMKCDIDIRKDLYANNVLSGGTTMYPGIADRMQKEITALAPSTMKIKIIAPPERKYSVWIGGSILASLSTFQQMWISKPEYDEAGPSIVHRKCF

SEQ ID NO: 3 - protein, 485 aa, Homo sapiens
MRKRAPQSEMAPAGVSLRATILCLLAWAGLAAGDRVYIHPFHLVIHNESTCEQLAKANAGKPKDPTFIPAPIQAKTSPVDEKALQDQLVLVAAKLDTEDKLRAAMVGMLANFLGFRIYGMHSELWGVVHGATVLSPTAVFGTLASLYLGALDHTADRLQAILGVPWKDKNCTSRLDAHKVLSALQAVQGLLVAQGRADSQAQLLLSTVVGVFTAPGLHLKQPFVQGLALYTPVVLPRSLDFTELDVAAEKIDRFMQAVTGWKTGCSLMGASVDSTLAFNTYVHFQGKMKGFSLLAEPQEFWVDNSTSVSVPMLSGMGTFQHWSDIQDNFSVTQVPFTESACLLLIQPHYASDLDKVEGLTFQQNSLNWMKKLSPRTIHLTMPQLVLQGSYDLQDLLAQAELPAILHTELNLQKLSNDRIRVGEVLNSIFFELEADEREPTESTQQLNKPEVLEVTLNRPFLFAVYDQSATALHFLGRVANPLSTA

SEQ ID NO: 4 - protein, 432 aa, Homo sapiens
MSDKLPYKVADIGLAAWGRKALDIAENEMPGLMRMRERYSASKPLKGARIAGCLHMTVETAVLIETLVTLGAEVQWSSCNIFSTQDHAAAAIAKAGIPVYAWKGETDEEYLWCIEQTLYFKDGPLNMILDDGGDLTNLIHTKYPQLLPGIRGISEETTTGVHNLYKMMANGILKVPAINVNDSVTKSKFDNLYGCRESLIDGIKRATDVMIAGKVAVVAGYGDVGKGCAQALRGFGARVIITEIDPINALQAAMEGYEVTTMDEACQEGNIFVTTTGCIDIILGRHFEQMKDDAIVCNIGHFDVEIDVKWLNENAVEKVNIKPQVDRYRLKNGRRIILLAEGRLVNLGCAMGHPSFVMSNSFTNQVMAQIELWTHPDKYPVGVHFLPKKLDEAVAEAHLGKLNVKLTKLTEKQAQYLGMSCDGPFKPDHYRY

SEQ ID NO: 5 - protein, 316 aa, Homo sapiens
MASRLLLNNGAKMPILGLGTWKSPPGQVTEAVKVAIDVGYRHIDCAHVYQNENEVGVAIQEKLREQVVKREELFIVSKLWCTYHEKGLVKGACQKTLSDLKLDYLDLYLIHWPTGFKPGKEFFPLDESGNVVPSDTNILDTWAAMEELVDEGLVKAIGISNFNHLQVEMILNKPGLKYKPAVNQIECHPYLTQEKLIQYCQSKGIVVTAYSPLGSPDRPWAKPEDPSLLEDPRIKAIAAKHNKTTAQVLIRFPMQRNLVVIPKSVTPERIAENFKVFDFELSSQDMTTLLSYNRNWRVCALLSCTSHKDYPFHEEF

SEQ ID NO: 6 - protein, 480 aa, Homo sapiens [sequence omitted]

SEQ ID NO: 7 - protein, 609 aa, Homo sapiens [sequence omitted]

SEQ ID NO: 8 - protein, 501 aa, Homo sapiens
MSSSGTPDLPVLLTDLKIQYTKIFINNEWHDSVSGKKFPVFNPATEEELCQVEEGDKEDVDKAVKAARQAFQIGSPWRTMDASERGRLLYKLADLIERDRLLLATMESMNGGKLYSNAYLNDLAGCIKTLRYCAGWADKIQGRTIPIDGNFFTYTRHEPIGVCGQIIPWNFPLVMLIWKIGPALSCGNTVVVKPAEQTPLTALHVASLIKEAGFPPGVVNIVPGYGPTAGAAISSHMDIDKVAFTGSTEVGKLIKEAAGKSNLKRVTLELGGKSPCIVLADADLDNAVEFAHHGVFYHQGQCCIAASRIFVEESIYDEFVRRSVERAKKYILGNPLTPGVTQGPQIDKEQYDKILDLIESGKKEGAKLECGGGPWGNKGYFVQPTVFSNVTDEMRIAKEEIFGPVQQIMKFKSLDDVIKRANNTFYGLSAGVFTKDIDKAITISSALQAGTVWVNCYGVVSAQCPFGGFKMSGNGRELGEYGFHEYTEVKTVTVKISQKNS

SEQ ID NO: 9 - protein, 517 aa, Homo sapiens
MLRFLAPRLLSLQGRTARYSSAAALPSPILNPDIPYNQLFINNEWQDAVSKKTFPTVNPTTGEVIGHVAEGDRADVDRAVKAAREAFRLGSPWRRMDASERGRLLNLLADLVERDRVYLASLETLDNGKPFQESYALDLDEVIKVYRYFAGWADKWHGKTIPMDGQHFCFTRHEPVGVCGQIIPWNFPLVMQGWKLAPALATGNTVVMKVAEQTPLSALYLASLIKEAGFPPGVVNIITGYGPTAGAAIAQHVDVDKVAFTGSTEVGHLIQKAAGDSNLKRVTLELGGKSPSIVLADADMEHAVEQCHEALFFNMGQCCCAGSRTFVEESIYNEFLERTVEKAKQRKVGNPFELDTQQGPQVDKEQFERVLGYIQLGQKEGAKLLCGGERFGERGFFIKPTVFGGVQDDMRIAKEEIFGPVQPLFKFKKIEEVVERANNTRYGLAAAVFTRDLDKAMYFTQALQAGTVWVNTYNIVTCHTPFGGFKESGNGRELGEDGLKAYTEVKTVTIKVPQKNS

SEQ ID NO: 10 - protein, 364 aa, Homo sapiens
MPYQYPALTPEQKKELSDIAHRIVAPGKGILAADESTGSIAKRLQSIGTENTEENRRFYRQLLLTADDRVNPCIGGVILFHETLYQKADDGRPFPQVIKSKGGVVGIKVDKGVVPLAGTNGETTTQGLDGLSERCAQYKKDGADFAKWRCVLKIGEHTPSALAIMENANVLARYASICQQNGIVPIVEPEILPDGDHDLKRCQYVTEKVLAAVYKALSDHHIYLEGTLLKPNMVTPGHACTQKFSHEEIAMATVTALRRTVPPAVTGITFLSGGQSEEEASINLNAINKCPLLKPWALTFSYGRALQASALKAWGGKKENLKAAQEEYVKRALANSLACQGKYTPSGQAGAAASESLFVSNHAY

SEQ ID NO: 11 - protein, 511 aa, Homo sapiens
MKFFLLLFTIGFCWAQYSPNTQQGRTSIVHLFEWRWVDIALECERYLAPKGFGGVQVSPPNENVAIHNPFRPWWERYQPVSYKLCTRSGNEDEFRNMVTRCNNVGVRIYVDAVINHMSGNAVSAGTSSTCGSYFNPGSRDFPAVPYSGWDFNDGKCKTGSGDIENYNDATQVRDCRLVGLLDLALEKDYVRSKIAEYMNHLIDIGVAGFRLDASKHMWPGDIKAILDKLHNLNSNWFPAGSKPFIYQEVIDLGGEPIKSSDYFGNGRVTEFKYGAKLGTVIRKWNGEKMSYLKNWGEGWGFMPSDRALVFVDNHDNQRGHGAGGASILTFWDARLYKMAVGFMLAHPYGFTRVMSSYRWPRQFQNGNDVNDWVGPPNNNGVIKEVTINPDTTCGNDWVCEHRWRQIRNMVNFRNVVDGQPFTNWYDNGSNQVAFGRGNRGFIVFNNDDWTFSLTLQTGLPAGTYCDVISGDKINGNCTGIKIYVSDDGKAHFSISNSAEDPFIAIHAESKL

SEQ ID NO: 12 - protein, 346 aa, Homo sapiens
MAMVSEFLKQAWFIENEEQEYVQTVKSSKGGPGSAVSPYPTFNPSSDVAALHKAIMVKGVDEATIIDILTKRNNAQRQQIKAAYLQETGKPLDETLKKALTGHLEEVVLALLKTPAQFDADELRAAMKGLGTDEDTLIEILASRTNKEIRDINRVYREELKRDLAKDITSDTSGDFRNALLSLAKGDRSEDFGVNEDLADSDARALYEAGERRKGTDVNVFNTILTTRSYPQLRRVFQKYTKYSKHDMNKVLDLELKGDIEKCLTAIVKCATSKPAFFAEKLHQAMKGVGTRHKALIRIMVSRSEIDMNDIKAFYQKMYGISLCQAILDETKGDYEKILVALCGGN

SEQ ID NO: 13 - protein, 323 aa, Homo sapiens
MASIWVGHRGTVRDYPDFSPSVDAEAIQKAIRGIGTDEKMLISILTERSNAQRQLIVKEYQAAYGKELKDDLKGDLSGHFEHLMVALVTPPAVFDAKQLKKSMKGAGTNEDALIEILTTRTSRQMKDISQAYYTVYKKSLGDDISSETSGDFRKALLTLADGRRDESLKVDEHLAKQDAQILYKAGENRWGTDEDKFTEILCLRSFPQLKLTFDEYRNISQKDIVDSIKGELSGHFEDLLLAIVNCVRNTPAFLAERLHRALKGIGTDEFTLNRIMVSRSEIDLLDIRTEFKKHYGYSLYSAIKSDTSGDYEITLLKICGGDD

SEQ ID NO: 14 - protein, 319 aa, Homo sapiens
MATKGGTVKAASGFNAMEDAQTLRKAMKGLGTDEDAIISVLAYRNTAQRQEIRTAYKSTIGRDLIDDLKSELSGNFEQVIVGMMTPTVLYDVQELRRAMKGAGTDEGCLIEILASRTPEEIRRISQTYQQQYGRSLEDDIRSDTSFMFQRVLVSLSAGGRDEGNYLDDALVRQDAQDLYEAGEKKWGTDEVKFLTVLCSRNRNHLLHVFDEYKRISQKDIEQSIKSETSGSFEDALLAIVKCMRNKSAYFAEKLYKSMKGLGTDDNTLIRVMVSRAEIDMLDIRAHFKRLYGKSLYSFIKGDTSGDYRKVLLVLCGGDD

SEQ ID NO: 15 - protein, 320 aa, Homo sapiens
MAQVLRGTVTDFPGFDERADAETLRKAMKGLGTDEESILTLLTSRSNAQRQEISAAFKTLFGRDLLDDLKSELTGKFEKLIVALMKPSRLYDAYELKHALKGAGTNEKVLTEIIASRTPEELRAIKQVYEEEYGSSLEDDVVGDTSGYYQRMLVVLLQANRDPDAGIDEAQVEQDAQALFQAGELKWGTDEEKFITIFGTRSVSHLRKVFDKYMTISGFQIEETIDRETSGNLEQLLLAVVKSIRSIPAYLAETLYYAMKGAGTDDHTLIRVMVSRSEIDLFNIRKEFRKNFATSLYSMIKGDTSGDYKKALLLLCGEDD

SEQ ID NO: 16 - protein, 2843 aa, Homo sapiens
MAAASYDQLLKQVEALKMENSNLRQELEDNSNHLTKLETEASNMKEVLKQLQGSIEDEAMASSGQIDLLERLKELNLDSSNFPGVKLRSKMSLRSYGSREGSVSSRSGECSPVPMGSFPRRGFVNGSRESTGYLEELEKERSLLLADLDKEEKEKDWYYAQLQNLTKRIDSLPLTENFSLQTDMTRRQLEYEARQIRVAMEEQLGTCQDMEKRAQRRIARIQQIEKDILRIRQLLQSQATEAERSSQNKHETGSHDAERQNEGQGVGEINMATSGNGQGSTTRMDHETASVLSSSSTHSAPRRLTSHLGTKVEMVYSLLSMLGTHDKDDMSRTLLAMSSSQDSCISMRQSGCLPLLIQLLHGNDKDSVLLGNSRGSKEARARASAALHNIIHSQPDDKRGRREIRVLHLLEQIRAYCETCWEWQEAHEPGMDQDKNPMPAPVEHQICPAVCVLMKLSFDEEHRHAMNELGGLQAIAELLQVDCEMYGLTNDHYSITLRRYAGMALTNLTFGDVANKATLCSMKGCMRALVAQLKSESEDLQQVIASVLRNLSWRADVNSKKTLREVGSVKALMECALEVKKESTLKSVLSALWNLSAHCTENKADICAVDGALAFLVGTLTYRSQTNTLAIIESGGGILRNVSSLIATNEDHRQILRENNCLQTLLQHLKSHSLTIVSNACGTLWNLSARNPKDQEALWDMGAVSMLKNLIHSKHKMIAMGSAAALRNLMANRPAKYKDANIMSPGSSLPSLHVRKQKALEAELDAQHLSETFDNIDNLSPKASHRSKQRHKQSLYGDYVFDTNRHDDNRSDNFNTGNMTVLSPYLNTTVLPSSSSSRGSLDSSRSEKDRSLERERGIGLGNYHPATENPGTSSKRGLQISTTAAQIAKVMEEVSAIHTSQEDRSSGSTTELHCVTDERNALRRSSAAHTHSNTYNFTKSENSNRTCSMPYAKLEYKRSSNDSLNSVSSSDGYGKRGQMKPSIESYSEDDESKFCSYGQYPADLAHKIHSANHMDDNDGELDTPINYSLKYSDEQLNSGRQSPSQNERWARPKHIIEDEIKQSEQRQSRNQSTTYPVYTESTDDKHLKFQPHFGQQECVSPYRSRGANGSETNRVGSNHGINQNVSQSLCQEDDYEDDKPTNYSERYSEEEQHEEEERPTNYSIKYNEEKRHVDQPIDYSLKYATDIPSSQKQSFSFSKSSSGQSSKTEHMSSSSENTSTPSSNAKRQNQLHPSSAQSRSGQPQKAATCKVSSINQETIQTYCVEDTPICFSRCSSLSSLSSAEDEIGCNQTTQEADSANTLQIAEIKEKIGTRSAEDPVSEVPAVSQHPRTKSSRLQGSSLSSESARHKAVEFSSGAKSPSKSGAQTPKSPPEHYVQETPLMFSRCTSVSSLDSFESRSIASSVQSEPCSGMVSGIISPSDLPDSPGQTMPPSRSKTPPPPPQTAQTKREVPKNKAPTAEKRESGPKQAAVNAAVQRVQVLPDADTLLHFATESTPDGFSCSSSLSALSLDEPFIQKDVELRIMPPVQENDNGNETESEQPKESNENQEKEAEKTIDSEKDLLDDSDDDDIEILEECIISAMPTKSSRKAKKPAQTASKLPPPVARKPSQLPVYKLLPSQNRLQPQKHVSFTPGDDMPRVYCVEGTPINFSTATSLSDLTIESPPNELAAGEGVRGGAQSGEFEKRDTIPTEGRSTDEAQGGKTSSVTIPELDDNKAEEGDILAECINSAMPKGKSHKPFRVKKIMDQVQQASASSSAPNKNQLDGKKKKPTSPVKPIPQNTEYRTRVRKNADSKNNLNAERVFSDNKDSKKQNLKNNSKVFNDKLPNNEDRVRGSFAFDSPHHYTPIEGTPYCFSRNDSLSSLDFDDDDVDLSREKAELRKAKENKESEAKVTSHTELTSNQQSANKTQAIAKQPINRGQPKPILQKQSTFPQSSKDIPDRGAATDEKLQNFAIENTPVCFSHNSSLSSLSDIDQENNNKENEPIKETEPPDSQGEPSKPQASGYAPKSFHVEDTPVCFSRNSSLSSLSIDSEDDLLQECISSAMPKKKKPSRLKGDNEKHSPRNMGGILGEDLTLDLKDIQRPDSEHGLSPDSENFDWKAIQEGANSIVSSLHQAAAAACLSRQASSDSDSILSLKSGISLGSPFHLTPDQEEKPFTSNKGPRILKPGEKSTLETKKIESESKGIKGGKKVYKSLITGKVRSNSEISGQMKQPLQANMPSISRGRTMIHIPGVRNSSSSTSPVSKKGPPLKTPASKSPSEGQTATTSPRGAKPSVKSELSPVARQTSQIGGSSKAPSRSGSRDSTPSRPAQQPLSRPIQSPGRNSISPGRNGISPPNKLSQLPRTSSPSTASTKSSGSGKMSYTSPGRQMSQQNLTKQTGLSKNASSIPRSESASKGLNQMNNGNGANKKVELSRMSSTKSSGSESDRSERPVLVRQSTFIKEAPSPTLRRKLEESASFESLSPSSRPASPTRSQAQTPVLSPSLPDMSLSTHSSVQAGGWRKLPPNLSPTIEYNDGRPAKRHDIARSHSESPSRLPINRSGTWKREHSKHSSSLPRVSTWRRTGSSSSILSASSESSEKAKSEDEKHVNSISGTKQSKENQVSAKGTWRKIKENEFSPTNSTSQTVSSGATNGAESKTLIYQMAPAVSKTEDVWVRIEDCPINNPRSGRSPTGNTPPVIDSVSEKANPNIKDSKDNQAKQNVGNGSVPMRTVGLENRLNSFIQVDAPDQKGTEIKPGQNNPVPVSETNESSIVERTPFSSSSSSKHSSPSGTVAARVTPFNYNPSPRKSSADSTSARPSQIPTPVNNNTKKRDSKTDSTESSGTQSPKRHSGSYLVTSV

SEQ ID NO: 17 - protein, 267 aa, Homo sapiens
MKAAVLTLAVLFLTGSQARHFWQQDEPPQSPWDRVKDLATVYVDVLKDSGRDYVSQFEGSALGKQLNLKLLDNWDSVTSTFSKLREQLGPVTQEFWDNLEKETEGLRQEMSKDLEEVKAKVQPYLDDFQKKWQEEMELYRQKVEPLRAELQEGARQKLHELQEKLSPLGEEMRDRARAHVDALRTHLAPYSDELRQRLAARLEALKENGGARLAEYHAKATEHLSTLSEKAKPALEDLRQGLLPVLESFKVSFLSALEEYTKKLNTQ

SEQ ID NO: 18 - protein, 83 aa, Homo sapiens
MRLFLSLPVLVVVLSIVLEGPAPAQGTPDVSSALDKLKEFGNTLEDKARELISRIKQSELSAKMREWFSETFQKVKEKLKIDS

SEQ ID NO: 19 - protein, 345 aa, Homo sapiens
MISPVLILFSSFLCHVAIAGRTCPKPDDLPFSTVVPLKTFYEPGEEITYSCKPGYVSRGGMRKFICPLTGLWPINTLKCTPRVCPFAGILENGAVRYTTFEYPNTISFSCNTGFYLNGADSAKCTEEGKWSPELPVCAPIICPPPSIPTFATLRVYKPSAGNNSLYRDTAVFECLPQHAMFGNDTITCTTHGNWTKLPECREVKCPFPSRPDNGFVNYPAKPTLYYKDKATFGCHDGYSLDGPEEIECTKLGNWSAMPSCKASCKVPVKKATVVYQGERVKIQEKFKNGMLHGDKVSFFCKNKEKKCSYTEDAQCIDGTIEVPKCFKEHSSLAFWKTDASDVKPC

SEQ ID NO: 20 - protein, 204 aa, Homo sapiens
MAEQEPTAEQLAQIAAENEEDEHSVNYKPPAQKSIQEIQELDKDDESLRKYKEALLGRVAVSADPNVPNVVVTGLTLVCSSAPGPLELDLTGDLESFKKQSFVLKEGVEYRIKISFRVNREIVSGMKYIQHTYRKGVKIDKTDYMVGSYGPRAEEYEFLTPVEEAPKGMLARGSYSIKSRFTDDDKTDHLSWEWNLTIKKDWKD

SEQ ID NO: 21 - protein, 529 aa, Homo sapiens
MLGFVGRVAAAPASGALRRLTPSASLPPAQLLLRAAPTAVHPVRDYAAQTSPSPKAGAATGRIVAVIGAVVDVQFDEGLPPILNALEVQGRETRLVLEVAQHLGESTVRTIAMDGTEGLVRGQKVLDSGAPIKIPVGPETLGRIMNVIGEPIDERGPIKTKQFAPIHAEAPEFMEMSVEQEILVTGIKVVDLLAPYAKGGKIGLFGGAGVGKTVLIMELINNVAKAHGGYSVFAGVGERTREGNDLYHEMIESGVINLKDATSKVALVYGQMNEPPGARARVALTGLTVAEYFRDQEGQDVLLFIDNIFRFTQAGSEVSALLGRIPSAVGYQPTLATDMGTMQERITTTKKGSITSVQAIYVPADDLTDPAPATTFAHLDATTVLSRAIAELGIYPAVDPLDSTSRIMDPNIVGSEHYDVARGVQKILQDYKSLQDIIAILGMDELSEEDKLTVSRARKIQRFLSQPFQVAEVFTGHMGKLVPLKETIKGFQQILAGEYDHLPEQAFYMVGPIEEAVAKADKLAEEHSS

SEQ ID NO: 22 - protein, 785 aa, Homo sapiens
MLPAAPGKGLGSPDPAPCGPAPPGNTKDIIMIYEEDAEEWALYLTEVFLHVVKREAILLYRLENFSFRHLELLNLTSYKCKLLILSNSLLRDLTPKKCQFLEKILHSPKSVVTLLCGVKSSDQLYELLNISQSRWEISTEQEPEDYISVIQSIIFKDSEDYFEVNIPTDLRAKHSGEISERKEIEELSEASRNTIPLAVVLPTEIPCENPGEIFIILRDEVIGDTVEVEFTSSNKRIRTRPALWNKKVWCMKALEFPAGSVHVNVYCDGIVKATTKIKYYPTAKAKECLFRMADSGESLCQNSIEELDGVLTSIFKHEIPYYEFQSLQTEICSQNKYTHFKELPTLLHCAAKFGLKNLAIHLLQCSGATWASKMKNMEGSDPAHIAERHGHKELKKIFEDFSIQEIDINNEQENDYEEDIASFSTYIPSTQNPAFHHESRKTYGQSADGAEANEMEGEGKQNGSGMETKHSPLEVGSESSEDQYDDLYVFIPGADPENNSQEPLMSSRPPLPPPRPVANAFQLERPHFTLPGTMVEGQMERSQNWGHPGVRQETGDEPKGEKEKKEEEKEQEEEEDPYTFAEIDDSEYDMILANLSIKKKTGSRSFIINRPPAPTPRPTSIPPKEETTPYIAQVFQQKTARRQSDDDKFCGLPKKQDRARIESPAFSTLRGCLTDGQEELILLQEKVKNGKMSMDEALEKFKHWQMGKSGLEMIQQEKLRQLRDCIIGKRPEEENVYNKLTIVHHPGGKETAHNENKFYNVHFSNKLPARPQVEKEFGFCCKKDH

SEQ ID NO: 23 - protein, 657 aa, Homo sapiens
MGEEDYYLELCERPVQFEKANPVNCVFFDEANKQVFAVRSGGATGVVVKGPDDRNPISFRMDDKGEVKCIKFSLENKILAVQRTSKTVDFCNFIPDNSQLEYTQECKTKNANILGFCWTSSTEIVFITDQGIEFYQVLPEKRSLKLLKSHNLNVNWYMYCPESAVILLSTTVLENVLQPFHFRAGTMSKLPKFEIELPAAPKSTKPSLSERDIAMATIYGQLYVLFLRHHSRTSNSTGAEVVLYHLPREGACKKMHILKLNRTGKFALNVVDNLVVVHHQDTETSVIFDIKLRGEFDGSVTFHHPVLPARSIQPYQIPITGPAAVTSQSPVPCKLYSSSWIVFQPDIIISASQGYLWNLQVKLEPIVNLLPDKGRLMDFLLQRKECKMVILSVCSQMLSESDRASLPVIATVFDKLNHEYKKYLDAEQSYAMAVEAGQSRSSPLLKRPVRTQAVLDQSDVYTHVLSAFVEKKEMPHKFVIAVLMEYIRSLNQFQIAVQHYLHELVIKTLVQHNLFYMLHQFLQYHVLSDSKPLACLLLSLESFYPPAHQLSLDMLKRLSTANDEIVEVLLSKHQVLAALRFIRGIGGHDNISARKFLDAAKQTEDNMLFYTIFRFFEQRNQRLRGSPNFTPGEHCEEHVAFFKQIFGDQALMRPTTF

SEQ ID NO: 24 - protein, 126 aa, Homo sapiens
MPSSTLTCKPFDLKQRSSRRGPKSTASASPRSCLKPSCGKQVCLLLSVRRSQSLAHPGRDSTRVLSYQQTSSDAVSQYKHTGKVEELYGLRLSWLSQAQFLLAQDKTAYAVKSVVLPASNHKTKGQ

SEQ ID NO: 25 - protein, 1663 aa, Homo sapiens
MGPTSGPSLLLLLLTHLPLALGSPMYSIITPNILRLESEETMVLEAHDAQGDVPVTVTVHDFPGKKLVLSSEKTVLTPATNHMGNVTFTIPANREFKSEKGRNKFVTVQATFGTQVVEKVVLVSLQSGYLFIQTDKTIYTPGSTVLYRIFTVNHKLLPVGRTVMVNIENPEGIPVKQDSLSSQNQLGVLPLSWDIPELVNMGQWKIRAYYENSPQQVFSTEFEVKEYVLPSFEVIVEPTEKFYYIYNEKGLEVTITARFLYGKKVEGTAFVIFGIQDGEQRISLPESLKRIPIEDGSGEVVLSRKVLLDGVQNPRAEDLVGKSLYVSATVILHSGSDMVQAERSGIPIVTSPYQIHFTKTPKYFKPGMPFDLMVFVTNPDGSPAYRVPVAVQGEDTVQSLTQGDGVAKLSINTHPSQKPLSITVRTKKQELSEAEQATRTMQALPYSTVGNSNNYLHLSVLRTELRPGETLNVNFLLRMDRAHEAKIRYYTYLIMNKGRLLKAGRQVREPGQDLVVLPLSITTDFIPSFRLVAYYTLIGASGQREVVADSVWVDVKDSCVGSLVVKSGQSEDRQPVPGQQMTLKIEGDHGARVVLVAVDKGVFVLNKKNKLTQSKIWDVVEKADIGCTPGSGKDYAGVFSDAGLTFTSSSGQQTAQRAELQCPQPAARRRRSVQLTEKRMDKVGKYPKELRKCCEDGMRENPMRFSCQRRTRFISLGEACKKVFLDCCNYITELRRQHARASHLGLARSNLDEDIIAEENIVSRSEFPESWLWNVEDLKEPPKNGISTKLMNIFLKDSITTWEILAVSMSDKKGICVADPFEVTVMQDFFIDLRLPYSVVRNEQVEIRAVLYNYRQNQELKVRVELLHNPAFCSLATTKRRHQQTVTIPPKSSLSVPYVIVPLKTGLQEVEVKAAVYHHFISDGVRKSLKVVPEGIRMNKTVAVRTLDPERLGREGVQKEDIPPADLSDQVPDTESETRILLQGTPVAQMTEDAVDAERLKHLIVTPSGCGEQNMIGMTPTVIAVHYLDETEQWEKFGLEKRQGALELIKKGYTQQLAFRQPSSAFAAFVKRAPSTWLTAYVVKVFSLAVNLIAIDSQVLCGAVKWLILEKQKPDGVFQEDAPVIHQEMIGGLRNNNEKDMALTAFVLISLQEAKDICEEQVNSLPGSITKAGDFLEANYMNLQRSYTVAIAGYALAQMGRLKGPLLNKFLTTAKDKNRWEDPGKQLYNVEATSYALLALLQLKDFDFVPPVVRWLNEQRYYGGGYGSTQATFMVFQALAQYQKDAPDHQELNLDVSLQLPSRSSKITHRIHWESASLLRSEETKENEGFTVTAEGKGQGTLSVVTMYHAKAKDQLTCNKFDLKVTIKPAPETEKRPQDAKNTMILEICTRYRGDQDATMSILDISMMTGFAPDTDDLKQLANGVDRYISKYELDKAFSDRNTLIIYLDKVSHSEDDCLAFKVHQYFNVELIQPGAVKVYAYYNLEESCTRFYHPEKEDGKLNKLCRDELCRCAEENCFIQKSDDKVTLEERLDKACEPGVDYVYKTRLVKVQLSNDFDEYIMAIEQTIKSGSDEVQVGQQRTFISPIKCREALKLEEKKHYLMWGLSSDFWGEKPNLSYIIGKDTWVEHWPEEDECQDEENQKQCQDLGAFTESMVVFGCPN

SEQ ID NO: 26 - protein, 559 aa, Homo sapiens
MSACRSFAVAICILEISILTAQYTTSYDPELTESSGSASHIDCRMSPWSEWSQCDPCLRQMFRSRSIEVFGQFNGKRCTDAVGDRRQCVPTEPCEDAEDDCGNDFQCSTGRCIKMRLRCNGDNDCGDFSDEDDCESEPRPPCRDRVVEESELARTAGYGINILGMDPLSTPFDNEFYNGLCNRDRDGNTLTYYRRPWNVASLIYETKGEKNFRTEHYEEQIEAFKSIIQEKTSNFNAAISLKFTPTETNKAEQCCEETASSISLHGKGSFRFSYSKNETYQLFLSYSSKKEKMFLHVKGEIHLGRFVMRNRDVVLTTTFVDDIKALPTTYEKGEYFAFLETYGTHYSSSGSLGGLYELIYVLDKASMKRKGVELKDIKRCLGYHLDVSLAFSEISVGAEFNKDDCVKRGEGRAVNITSENLIDDVVSLIRGGTRKYAFELKEKLLRGTVIDVTDFVNWASSINDAPVLISQKLSPIYNLVPVKMKNAHLKKQNLERAIEDYINEFSVRKCHTCQNGGTVILMDGKCLCACPFKFEGIACEISKQKISEGLPALEFPNEK

SEQ ID NO: 27 - protein, 261 aa, Homo sapiens
MASPDWGYDDKNGPEQWSKLYPIANGNNQSPVDIKTSETKHDTSLKPISVSYNPATAKEIINVGHSFHVNFEDNDNRSVLKGGPFSDSYRLFQFHFHWGSTNEHGSEHTVDGVKYSAELHVAHWNSAKYSSLAEAASKADGLAVIGVLMKVGEANPKLQKVLDALQAIKTKGKRAPFTNFDPSTLLPSSLDFWTYPGSLTHPPLYESVTWIICKESISVSSEQLAQFRSLLSNVEGDNAVPMQHNNRPTQPLKGRTVRASF

SEQ ID NO: 28 - protein, 260 aa, Homo sapiens
MSHHWGYGKHNGPEHWHKDFPIAKGERQSPVDIDTHTAKYDPSLKPLSVSYDQATSLRILNNGHAFNVEFDDSQDKAVLKGGPLDGTYRLIQFHFHWGSLDGQGSEHTVDKKKYAAELHLVHWNTKYGDFGKAVQQPDGLAVLGIFLKVGSAKPGLQKVVDVLDSIKTKGKSADFTNFDPRGLLPESLDYWTYPGSLTTPPLLECVTWIVLKEPISVSSEQVLKFRKLNFNGEGEPEELMVDNWRPAQPLKNRQIKASFK

SEQ ID NO: 29 - protein, 417 aa, Homo sapiens
MLLSVPLLLGLLGLAVAEPAVYFKEQFLDGDGWTSRWIESKHKSDFGKFVLSSGKFYGDEEKDKGLQTSQDARFYALSASFEPFSNKGQTLVVQFTVKHEQNIDCGGGYVKLFPNSLDQTDMHGDSEYNIMFGPDICGPGTKKVHVIFNYKGKNVLINKDIRCKDDEFTHLYTLIVRPDNTYEVKIDNSQVESGSLEDDWDFLPPKKIKDPDASKPEDWDERAKIDDPTDSKPEDWDKPEHIPDPDAKKPEDWDEEMDGEWEPPVIQNPEYKGEWKPRQIDNPDYKGTWIHPEIDNPEYSPDPSIYAYDNFGVLGLDLWQVKSGTIFDNFLITNDEAYAEEFGNETWGVTKAAEKQMKDKQDEEQRLKEEEEDKKRKEEEEAEDKEDDEDKDEDEEDEEDKEEDEEEDVPGQAKDEL

SEQ ID NO: 30 - protein, 348 aa, Homo sapiens
MYTAIPQSGSPFPGSVQDPGLHVWRVEKLKPVPVAQENQGVFFSGDSYLVLHNGPEEVSHLHLWIGQQSSRDEQGACAVLAVHLNTLLGERPVQHREVQGNESDLFMSYFPRGLKYQEGGVESAFHKTSTGAPAAIKKLYQVKGKKNIRATERALNWDSFNTGDCFILDLGQNIFAWCGGKSNILERNKARDLALAIRDSERQGKAQVEIVTDGEEPAEMIQVLGPKPALKEGNPEEDLTADKANAQAAALYKVSDATGQMNLTKVADSSPFALELLISDDCFVLDNGLCGKIYIWKGRKANEKERQAALQVAEGFISRMQYAPNTQVEILPQGHESPIFKQFFKDWK

SEQ ID NO: 31 - protein, 80 aa, Homo sapiens
MGRAMVARLGLGLLLLALLLPTQIYSSETTTGTSSNSSQSTSNTGLAPNPTNATTKAAGGALQSTASLFVVSLSLLHLYS

SEQ ID NO: 32 - protein, 238 aa, Homo sapiens
MAVEGGMKCVKFLLYVLLLAFCACAVGLIAVGVGAQLVLSQTIIQGATPGSLLPVVIIAVGVFLFLVAFVGCCGACKENYCLMITFAIFLSLIMLVEVAAAIAGYVFRDKVMSEFNNNFRQQMENYPKNNHTASILDRMQADFKCCGAANYTDWEKIPSMSKNRVPDSCCINVTVGCGINFNEKAIHKEGCVEKIGGWLRKNVLVVAAAALGIAFVEVLGIVFACCLVKSIRSGYEVM

SEQ ID NO: 33 - protein, 146 aa, Homo sapiens [sequence omitted]

SEQ ID NO: 34 - protein, 252 aa, Homo sapiens
MGPPSASPHRECIPWQGLLLTASLLNFWNPPTTAKLTIESMPLSVAEGKEVLLLVHNLPQHLFGYSWYKGERVDGNSLIVGYVIGTQQATPGAAYSGRETIYTNASLLIQNVTQNDIGFYTLQVIKSDLVNEEATGQFHVYQENAPGLPVGAVAGIVTGVLVGVALVAALVCFLLLAKTGRTSIQRDLKEQQPQALAPGRGPSHSSAFSMSPLSTAQAPLPNPRTAASIYEELLKHDTNIYCRMDHKAEVAS

SEQ ID NO: 35 - protein, 702 aa, Homo sapiens
MESPSAPPHRWCIPWQRLLLTASLLTFWNPPTTAKLTIESTPFNVAEGKEVLLLVHNLPQHLFGYSWYKGERVDGNRQIIGYVIGTQQATPGPAYSGREIIYPNASLLIQNIIQNDTGFYTLHVIKSDLVNEEATGQFRVYPELPKPSISSNNSKPVEDKDAVAFTCEPETQDATYLWWVNNQSLPVSPRLQLSNGNRTLTLFNVTRNDTASYKCETQNPVSARRSDSVILNVLYGPDAPTISPLNTSYRSGENLNLSCHAASNPPAQYSWFVNGTFQQSTQELFIPNITVNNSGSYTCQAHNSDTGLNRTTVTTITVYAEPPKPFITSNNSNPVEDEDAVALTCEPEIQNTTYLWWVNNQSLPVSPRLQLSNDNRTLTLLSVTRNDVGPYECGIQNKLSVDHSDPVILNVLYGPDDPTISPSYTYYRPGVNLSLSCHAASNPPAQYSWLIDGNIQQHTQELFISNITEKNSGLYTCQANNSASGHSRTTVKTITVSAELPKPSISSNNSKPVEDKDAVAFTCEPEAQNTTYLWWVNGQSLPVSPRLQLSNGNRTLTLFNVTRNDARAYVCGIQNSVSANRSDPVTLDVLYGPDTPIISPPDSSYLSGANLNLSCHSASNPSPQYSWRINGIPQQHTQVLFIAKITPNNNGTYACFVSNLATGRNNSIVKSITVSASGTSPGLSAGATVGIMIGVLVGVALI

SEQ ID NO: 36 - protein, 344 aa, Homo sapiens
MGPPSAPPCRLHVPWKEVLLTASLLTFWNPPTTAKLTIESTPFNVAEGKEVLLLAHNLPQNRIGYSWYKGERVDGNSLIVGYVIGTQQATPGPAYSGRETIYPNASLLIQNVTQNDTGFYTLQVIKSDLVNEEATGQFHVYPELPKPSISSNNSNPVEDKDAVAFTCEPEVQNTTYLWWVNGQSLPVSPRLQLSNGNMTLTLLSVKRNDAGSYECEIQNPASANRSDPVTLNVLYGPDGPTISPSKANYRPGENLNLSCHAASNPPAQYSWFINGTFQQSTQELFIPNITVNNSGSYMCQAHNSATGLNRTTVTMITVSGSAPVLSAVATVGITIGVLARVALI

SEQ ID NO: 37 - protein, 165 aa, Homo sapiens
MEMFQGLLLLLLLSMGGTWASKEPLRPRCRPINATLAVEKEGCPVCITVNTTICAGYCPTMTRVLQGVLPALPQVVCNYRDVRFESIRLPGCPRGVNPVVSYAVALSCQCALCRRSTTDCGGPKDHPLTCDDPRFQDSSSSKAPPPSLPSPSRLPGPSDTPILPQ

SEQ ID NO: 38 - protein, 383 aa, Homo sapiens
MGVKASQTGFVVLVLLQCCSAYKLVCYYTSWSQYREGDGSCFPDALDRFLCTHIIYSFANISNDHIDTWEWNDVTLYGMLNTLKNRNPNLKTLLSVGGWNFGSQRFSKIASNTQSRRTFIKSVPPFLRTHGFDGLDLAWLYPGRRDKQHFTTLIKEMKAEFIKEAQPGKKQLLLSAALSAGKVTIDSSYDIAKISQHLDFISIMTYDFHGAWRGTTGHHSPLFRGQEDASPDRFSNTDYAVGYMLRLGAPASKLVMGIPTFGRSFTLASSETGVGAPISGPGIPGRFTKEAGTLAYYEICDFLRGATVHRILGQQVPYATKGNQWVGYDDQESVKSKVQYLKDRQLAGAMVWALDLDDFQGSFCGQDLRFPLTNAIKDALAAT

SEQ ID NO: 39 - protein, 381 aa, Homo sapiens
MPFSNSHNALKLRFPAEDEFPDLSAHNNHMAKVLTPELYAELRAKSTPSGFTLDDVIQTGVDNPGHPYIMTVGCVAGDEESYEVFKDLFDPIIEDRHGGYKPSDEHKTDLNPDNLQGGDDLDPNYVLSSRVRTGRSIRGFCLPPHCSRGERRAIEKLAVEALSSLDGDLAGRYYALKSMTEAEQQQLIDDHFLFDKPVSPLLLASGMARDWPDARGIWHNDNKTFLVWVNEEDHLRVISMQKGGNMKEVFTRFCTGLTQIETLFKSKDYEFMWNPHLGYILTCPSNLGTGLRAGVHIKLPNLGKHEKFSEVLKRLRLQKRGTGGVDTAAVGGVFDVSNADRLGFSEVELVQMVVDGVKLLIEMEQRLEQGQAIDDLMPAQK

SEQ ID NO: 40 - protein, 215 aa, Homo sapiens
MGLEKPQSKLEGGMHPQLIPSVIAVVFILLLSVCFIASCLVTHHNFSRCKRGTGVHKLEHHAKLKCIKEKSELKSAEGSTWNCCPIDWRAFQSNCYFPLTDNKTWAESERNCSGMGAHLMTISTEAEQNFIIQFLDRRLSYFLGLRDENAKGQWRWVDQTPFNPRRVFWHKNEPDNSQGENCVVLVYNQDKWAWNDVPCNFEASRICKIPGTTLN

SEQ ID NO: 41 - protein, 449 aa, Homo sapiens
MMKTLLLFVGLLLTWESGQVLGDQTVSDNELQEMSNQGSKYVNKEIQNAVNGVKQIKTLIEKTNEERKTLLSNLEEAKKKKEDALNETRESETKLKELPGVCNETMMALWEECKPCLKQTCMKFYARVCRSGSGLVGRQLEEFLNQSSPFYFWMNGDRIDSLLENDRQQTHMLDVMQDHFSRASSIIDELFQDRFFTREPQDTYHYLPFSLPHRRPHFFFPKSRIVRSLMPFSPYEPLNFHAMFQPFLEMIHEAQQAMDIHFHSPAFQHPPTEFIREGDDDRTVCREIRHNSTGCLRMKDQCDKCREILSVDCSTNNPSQAKLRRELDESLQVAERLTRKYNELLKSYQWKMLNTSSLLEQLNEQFNWVSRLANLTQGEDQYYLRVTTVASHTSDSDVPSGVTEVVVKLFDSDPITVTVPVEVSRKNPKFMETVAEKALQEYRKKHREE

SEQ ID NO: 42 - protein, 297 aa, Homo sapiens
MSSAHFNRGPAYGLSAEVKNKLAQKYDHQREQELREWIEGVTGRRIGNNFMDGLKDGIILCEFINKLQPGSVKKINESTQNWHQLENIGNFIKAITKYGVKPHDIFEANDLFENTNHTQVQSTLLALASMAKTKGNKVNVGVKYAEKQERKFEPGKLREGRNIIGLQMGTNKFASQQGMTAYGTRRHLYDPKLGTDQPLDQATISLQMGTNKGASQAGMTAPGTKRQIFEPGLGMEHCDTLNVSLQMGSNKGASQRGMTVYGLPRQVYDPKYCLTPEYPELGEPAHNHHAHNYYNSA

SEQ ID NO: 43 - protein, 474 aa, Homo sapiens
MRRVVRQSKFRHVFGQAVKNDQCYDDIRVSRVTWDSSFCAVNPRFVAIIIEASGGGAFLVLPLHKTGRIDKSYPTVCGHTGPVLDIDWCPHNDQVIASGSEDCTVMVWQIPENGLTLSLTEPVVILEGHSKRVGIVAWHPTARNVLLSAGCDNAIIIWNVGTGEALINLDDMHSDMIYNVSWNRNGSLICTASKDKKVRVIDPRKQEIVAEKEKAHEGARPMRAIFLADGNVFTTGFSRMSERQLALWNPKNMQEPIALHEMDTSNGVLLPFYDPDTSIIYLCGKGDSSIRYFEITDESPYVHYLNTFSSKEPQRGMGYMPKRGLDVNKCEIARFFKLHERKCEPIIMTVPRKSDLFQDDLYPDTAGPEAALEAEEWFEGKNADPILISLKHGYIPGKNRDLKVVKKNILDSKPTANKKCDLISIPKKTTDTASVQNEAKLDEILKEIKSIKDTICNQDERISKLEQQMAKIAA

SEQ ID NO: 44 - protein, 224 aa, Homo sapiens
MEKLLCFLVLTSLSHAFGQTDMSRKAFVFPKESDTSYVSLKAPLTKPLKAFTVCLHFYTELSSTRGYSIFSYATKRQDNEILIFWSKDIGYSFTVGGSEILFEVPEVTVAPVHICTSWESASGIVEFWVDGKPRVRKSLKKGYTVGAEASIILGQEQDSFGGNFEGSQSLVGDIGNVNMWDFVLSPDEINTIYLGGPFSPNVLNWRALKYEVQGEVFTKPQLWP

SEQ ID NO: 45 - protein, 554 aa, Homo sapiens
MTAPGAAGRCPPTTWLGSLLLLVCLLASRSITEEVSEYCSHMIGSGHLQSLQRLIDSQMETSCQITFEFVDQEQLKDPVCYLKKAFLLVQDIMEDTMRFRDNTPNAIAIVQLQELSLRLKSCFTKDYEEHDKACVRTFYETPLQLLEKVKNVFNETKNLLDKDWNIFSKNCNNSFAECSSQDVVTKPDCNCLYPKAIPSSDPASVSPHQPLAPSMAPVAGLTWEDSEGTEGSSLLPGEQPLHTVDPGSAKQRPPRSTCQSFEPPETPVVKDSTIGGSPQPRPSVGAFNPGMEDILDSAMGTNWVPEEASGEASEIPVPQGTELSPSRPGGGSMQTEPARPSNFLSASSPLPASAKGQQPADVTGTALPRVGPVRPTGQDWNHTPQKTDHPSALLRDPPEPGSPRISSLRPQGLSNPSTLSAQPQLSRSHSSGSVLPLGELEGRRSTRDRRSPAEPEGGPASEGAARPLPRFNSVPLTDTGHERQSEGSFSPQLQESVFHLLVPSVILVLLAVGGLLFYRWRRRSHQEPQRADSPLEQPEGSPLTQDDRQVELPV

SEQ ID NO: 46 - protein, 781 aa, Homo sapiens
MATQADLMELDMAMEPDRKAAVSHWQQQSYLDSGIHSGATTTAPSLSGKGNPEEEDVDTSQVLYEWEQGFSQSFTQEQVADIDGQYAMTRAQRVRAAMFPETLDEGMQIPSTQFDAAHPTNVQRLAEPSQMLKHAVVNLINYQDDAELATRAIPELTKLLNDEDQVVVNKAAVMVHQLSKKEASRHAIMRSPQMVSAIVRTMQNTNDVETARCTAGTLHNLSHHREGLLAIFKSGGIPALVKMLGSPVDSVLFYAITTLHNLLLHQEGAKMAVRLAGGLQKMVALLNKTNVKFLAITTDCLQILAYGNQESKLIILASGGPQALVNIMRTYTYEKLLWTTSRVLKVLSVCSSNKPAIVEAGGMQALGLHLTDPSQRLVQNCLWTLRNLSDAATKQEGMEGLLGTLVQLLGSDDINVVTCAAGILSNLTCNNYKNKMMVCQVGGIEALVRTVLRAGDREDITEPAICALRHLTSRHQEAEMAQNAVRLHYGLPVVVKLLHPPSHWPLIKATVGLIRNLALCPANHAPLREQGAIPRLVQLLVRAHQDTQRRTSMGGTQQQFVEGVRMEEIVEGCTGALHILARDVHNRIVIRGLNTIPLFVQLLYSPIENIQRVAAGVLCELAQDKEAAEAIEAEGATAPLTELLHSRNEGVATYAAAVLFRMSEDKPQDYKKRLSVELTSSLFRTEPMAWNETADLGLDIGAQGEPLGYRQDDPSYRSFHSGGYGQDALGMDPMMEHEMGGHHPGADYPVDGLPDLGHAQDLMDGLPPGDSNQLAWFDTDL

SEQ ID NO: 47 - protein, 412 aa, Homo sapiens
MQPSSLLPLALCLLAAPASALVRIPLHKFTSIRRTMSEVGGSVEDLIAKGPVSKYSQAVPAVTEGPIPEVLKNYMDAQYYGEIGIGTPPQCFTVVFDTGSSNLWVPSIHCKLLDIACWIHHKYNSDKSSTYVKNGTSFDIHYGSGSLSGYLSQDTVSVPCQSASSASALGGVKVERQVFGEATKQPGITFIAAKFDGILGMAYPRISVNNVLPVFDNLMQQKLVDQNIFSFYLSRDPDAQPGGELMLGGTDSKYYKGSLSYLNVTRKAYWQVHLDQVEVASGLTLCKEGCEAIVDTGTSLMVGPVDEVRELQKAIGAVPLIQGEYMIPCEKVSTLPAITLKLGGKGYKLSPEDYTLKVSQAGKTLCLSGFMGMDIPPPSGPLWILGDVFIGRYYTVFDRDNNRVGFAEAARL

SEQ ID NO: 48 - protein, 331 aa, Homo sapiens
MKRLVCVLLVCSSAVAQLHKDPTLDHHWHLWKKTYGKQYKEKNEEAVRRLIWEKNLKFVMLHNLEHSMGMHSYDLGMNHLGDMTSEEVMSLMSSLRVPSQWQRNITYKSNPNRILPDSVDWREKGCVTEVKYQGSCGACWAFSAVGALEAQLKLKTGKLVSLSAQNLVDCSTEKYGNKGCNGGFMTTAFQYIIDNKGIDSDASYPYKAMDQKCQYDSKYRAATCSKYTELPYGREDVLKEAVANKGPVSVGVDARHPSFFLYRSGVYYEPSCTQNVNHGVLVVGYGDLNGKEYWLVKNSWGHNFGEEGYIRMARNKGNHCGIASFPSYPEI

SEQ ID NO: 49 - protein, 303 aa, Homo sapiens
MARRGPGWRPLLLLVLLAGAAQGGLYFRRGQTCYRPLRGDGLAPLGRSTYPRPHEYLSPADLPKSWDWRNVDGVNYASITRNQHIPQYCGSCWAHASTSAMADRINIKRKGAWPSTLLSVQNVIDCGNAGSCEGGNDLSVWDYAHQHGIPDETCNNYQAKDQECDKFNQCGTCNEFKECHAIRNYTLWRVGDYGSLSGREKMMAEIYANGPISCGIMATERLANYTGGIYAEYQDTTYINHVVSVAGWGISDGTEYWIVRNSWGEPWGERGWLRIVTSTYKDGKGARYNLAIEEHCTFGDPIV

SEQ ID NO: 50 - protein, 776 aa, Homo sapiens
MSSTRSQNPHGLKQIGLDQIWDDLRAGIQQVYTRQSMAKSRYMELYTHVYNYCTSVHQSNQARGAGVPPSKSKKGQTPGGAQFVGLELYKRLKEFLKNYLTNLLKDGEDLMDESVLKFYTQQWEDYRFSSKVLNGICAYLNRHWVRRECDEGRKGIYEIYSLALVTWRDCLFRPLNKQVTNAVLKLIEKERNGETINTRLISGVVQSYVELGLNEDDAFAKGPTLTVYKESFESQFLADTERFYTRESTEFLQQNPVTEYMKKAEARLLEEQRRVQVYLHESTQDELARKCEQVLIEKHLEIFHTEFQNLLDADKNEDLGRMYNLVSRIQDGLGELKKLLETHIHNQGLAAIEKCGEAALNDPKMYVQTVLDVHKKYNALVMSAFNNDAGFVAALDKACGRFINNNAVTKMAQSSSKSPELLARYCDSLLKKSSKNPEEAELEDTLNQVMVVFKYIEDKDVFQKFYAKMLAKRLVHQNSASDDAEASMISKLKQACGFEYTSKLQRMFQDIGVSKDLNEQFKKHLTNSEPLDLDFSIQVLSSGSWPFQQSCTFALPSELERSYQRFTAFYASRHSGRKLTWLYQLSKGELVTNCFKNRYTLQASTFQMAILLQYNTEDAYTVQQLTDSTQIKMDILAQVLQILLKSKLLVLEDENANVDEVELKPDTLIKLYLGYKNKKLRVNINVPMKTEQKQEQETTHKNIEEDRKLLIQAAIVRIMKMRKVLKHQQLLGEVLTQLSSRFKPRVPVIKKCIDILIEKEYLERVDGEKDTYSYLA

SEQ ID NO: 51 - protein, 501 aa, Homo sapiens
MPSASASRKSQEKPREIMDAAEDYAKERYGISSMIQSQEKPDRVLVRVRDLTIQKADEVVWVRARVHTSRAKGKQCFLVLRQQQFNVQALVAVGDHASKQMVKFAANINKESIVDVEGVVRKVNQKIGSCTQQDVELHVQKIYVISLAEPRLPLQLDDAVRPEAEGEEEGRATVNQDTRLDNRVIDLRTSTSQAVFRLQSGICHLFRETLINKGFVEIQTPKIISAASEGGANVFTVSYFKNNAYLAQSPQLYKQMCICADFEKVFSIGPVFRAEDSNTHRHLTEFVGLDIEMAFNYHYHEVMEEIADTMVQIFKGLQERFQTEIQTVNKQFPCEPFKFLEPTLRLEYCEALAMLREAGVEMGDEDDLSTPNEKLLGHLVKEKYDTDFYILDKYPLAVRPFYTMPDPRNPKQSNSYDMFMRGEEILSGAQRIHDPQLLTERALHHGIDLEKIKAYIDSFRFGAPPHAGGGIGLERVTMLFLGLHNVRQTSMFPRDPKRLTP

SEQ ID NO: 52 - protein, 94 aa, Homo sapiens
MRTLAILAAILLVALQAQAEPLQARADEVAAAPEQIAADIPEVVVSLAWDESLAPKHPGSRKNMACYCRIPACIAGERRYGTCIYQGRLWAFCC

SEQ ID NO: 53 - protein, 94 aa, Homo sapiens
MRTLAILAAILLVALQAQAEPLQARADEVAAAPEQIAADIPEVVVSLAWDESLAPKHPGSRKNMDCYCRIPACIAGERRYGTCIYQGRLWAFCC

SEQ ID NO: 54 - protein, 470 aa, Homo sapiens
MSQAYSSSQRVSSYRRTFGGAPGFPLGSPLSSPVFPRAGFGSKGSSSSVTSRVYQVSRTSGGAGGLGSLRASRLGTTRTPSSYGAGELLDFSLADAVNQEFLTTRTNEKVELQELNDRFANYIEKVRFLEQQNAALAAEVNRLKGREPTRVAELYEEELRELRRQVEVLTNQRARVDVERDNLLDDLQRLKAKLQEEIQLKEEAENNLAAFRADVDAATLARIDLERRIESLNEEIAFLKKVHEEEIRELQAQLQEQQVQVEMDMSKPDLTAALRDIRAQYETIAAKNISEAEEWYKSKVSDLTQAANKNNDALRQAKQEMMEYRHQIQSYTCEIDALKGTNDSLMRQMRELEDRFASEASGYQDNIARLEEEIRHLKDEMARHLREYQDLLNVKMALDVEIATYRKLLEGEESRINLPIQTYSALNFRETSPEQRGSEVHTKKTVMIKTIETRDGEVVSEATQQQHEVL

SEQ ID NO: 55 - protein, 766 aa, Homo sapiens
MKTPWKVLLGLLGAAALVTIITVPVVLLNKGTDDATADSRKTYTLTDYLKNTYRLKLYSLRWISDHEYLYKQENNILVFNAEYGNSSVFLENSTFDEFGHSINDYSISPDGQFILLEYNYVKQWRHSYTASYDIYDLNKRQLITEERIPNNTQWVTWSPVGHKLAYVWNNDIYVKIEPNLPSYRITWTGKEDIIYNGITDWVYEEEVFSAYSALWWSPNGTFLAYAQFNDTEVPLIEYSFYSDESLQYPKTVRVPYPKAGAVNPTVKFFVVNTDSLSSVTNATSIQITAPASMLIGDHYLCDVTWATQERISLQWLRRIQNYSVMDICDYDESSGRWNCLVARQHIEMSTTGWVGRFRPSEPHFTLDGNSFYKIISNEEGYRHICYFQIDKKDCTFITKGTWEVIGIEALTSDYLYYISNEYKGMPGGRNLYKIQLSDYTKVTCLSCELNPERCQYYSVSFSKEAKYYQLRCSGPGLPLYTLHSSVNDKGLRVLEDNSALDKMLQNVQMPSKKLDFIILNETKFWYQMILPPHFDKSKKYPLLLDVYAGPCSQKADTVFRLNWATYLASTENIIVASFDGRGSGYQGDKIMHAINRRLGTFEVEDQIEAARQFSKMGFVDNKRIAIWGWSYGGYVTSMVLGSGSGVFKCGIAVAPVSRWEYYDSVYTERYMGLPTPEDNLDHYRNSTVMSRAENFKQVEYLLIHGTADDNVHFQQSAQISKALVDVGVDFQAMWYTDEDHGIASSTAHQHIYTHMSHFIKQCFSLP

SEQ ID NO: 56 - protein, 572 aa, Homo sapiens
MSYQGKKNIPRITSDRLLIKGGKIVNDDQSFYADIYMEDGLIKQIGENLIVPGGVKTIEAHSRMVIPGGIDVHTRFQMPDQGMTSADDFFQGTKAALAGGTTMIIDHVVPEPGTSLLAAFDQWREWADSKSCCDYSLHVDISEWHKGIQEEMEALVKDHGVNSFLVYMAFKDRFQLTDCQIYEVLSVIRDIGAIAQVHAENGDIIAEEQQRILDLGITGPEGHVLSRPEEVEAEAVNRAITIANQTNCPLYITKVMSKSSAEVIAQARKKGTVVYGEPITASLGTDGSHYWSKNWAKAAAFVTSPPLSPDPTTPDFLNSLLSCGDLQVTGSAHCTFNTAQKAVGKDNFTLIPEGTNGTEERMSVIWDKAVVTGKMDENQFVAVTSTNAAKVFNLYPRKGRIAVGSDADLVIWDPDSVKTISAKTHNSSLEYNIFEGMECRGSPLVVISQGKIVLEDGTLHVTEGSGRYIPRKPFPDFVYKRIKARSRLAELRGVPRGLYDGPVCEVSVTPKTVTPASSAKTSPAKQQAPPVRNLHQSGFSLSGAQIDDNIPRRTTQRIVAPPGGRANITSLG

SEQ ID NO: 57 - protein, 4646 aa, Homo sapiens [sequence omitted]

SEQ ID NO: 58 - protein, 328 aa, Homo sapiens
MAAGIVASRRLRDLLTRRLTGSNYPGLSISLRLTGSSAQEEASGVALGEAPDHSYESLRVTSAQKHVLHVQLNRPNKRNAMNKVFWREMVECFNKISRDADCRAVVISGAGKMFTAGIDLMDMASDILQPKGDDVARISWYLRDIITRYQETFNVIERCPKPVIAAVHGGCIGGGVDLVTACDIRYCAQDAFFQVKEVDVGLAADVGTLQRLPKVIGNQSLVNELAFTARKMMADEALGSGLVSRVFPDKEVMLDAALALAAEISSKSPVAVQSTKVNLLYSRDHSVAESLNYVASWNMSMLQTQDLVKSVQATTENKELKTVTFSKL

SEQ ID NO: 59 - protein, 858 aa, Homo sapiens
MVNFTVDQIRAIMDKKANIRNMSVIAHVDHGKSTLTDSLVCKAGIIASARAGETRFTDTRKDEQERCITIKSTAISLFYELSENDLNFIKQSKDGAGFLINLIDSPGHVDFSSEVTAALRVTDGALVVVDCVSGVCVQTETVLRQAIAERIKPVLMMNKMDRALLELQLEPEELYQTFQRIVENVNVIISTYGEGESGPMGNIMIDPVLGTVGFGSGLHGWAFTLKQFAEMYVAKFAAKGEGQLGPAERAKKVEDMMKKLWGDRYFDPANGKFSKSATSPEGKKLPRTFCQLILDPIFKVFDAIMNFKKEETAKLIEKLDIKLDSEDKDKEGKPLLKAVMRRWLPAGDALLQMITIHLPSPVTAQKYRCELLYEGPPDDEAAMGIKSCDPKGPLMMYISKMVPTSDKGRFYAFGRVFSGLVSTGLKVRIMGPNYTPGKKEDLYLKPIQRTILMMGRYVEPIEDVPCGNIVGLVGVDQFLVKTGTITTFEHAHNMRVMKFSVSPVVRVAVEAKNPADLPKLVEGLKRLAKSDPMVQCIIEESGEHIIAGAGELHLEICLKDLEEDHACIPIKKSDPVVSYRETVSEESNVLCLSKSPNKHNRLYMKARPFPDGLAEDIDKGEVSARQELKQRARYLAEKYEWDVAEARKIWCFGPDGTGPNILTDITKGVQYLNEIKDSVVAGFQWATKEGALCEENMRGVRFDVHDVTLHADAIHRGGGQIIPTARRCLYASVLTAQPRLMEPIYLVEIQCPEQVVGGIYGVLNRKRGHVFEESQVAGTPMFVVKAYLPVNESFGFTADLRSNTGGQAFPQCVFDHWQILPGDPFDNSSRPSQVVAETRKRKGLKEGIPALDNFLDKL

SEQ ID NO: 60 - protein, 411 aa, Homo sapiens
MATTATMATSGSARKRLLKEEDMTKVEFETSEEVDVTPTFDTMGLREDLLRGIYAYGFEKPSAIQQRAIKQIIKGRDVIAQSQSGTGKTATFSISVLQCLDIQVRETQALILAPTRELAVQIQKGLLALGDYMNVQCHACIGGTNVGEDIRKLDYGQHVVAGTPGRVFDMIRRRSLRTRAIKMLVLDEADEMLNKGFKEQIYDVYRYLPPATQVVLISATLPHEILEMTNKFMTDPIRILVKRDELTLEGIKQFFVAVEREEWKFDTLCDLYDTLTITQAVIFCNTKRKVDWLTEKMREANFTVSSMHGDMPQKERESIMKEFRSGASRVLISTDVWARGLDVPQVSLIINYDLPNNRELYIHRIGRSGRYGRKGVAINFVKNDDIRILRDIEQYYSTQIDEMPMNVADLI

SEQ ID NO: 61 - protein, 434 aa, Homo sapiens
MSILKIHAREIFDSRGNPTVEVDLFTSKGLFRAAVPSGASTGIYEALELRDNDKTRYMGKGVSKAVEHINKTIAPALVSKKLNVTEQEKIDKLMIEMDGTENKSKFGANAILGVSLAVCKAGAVEKGVPLYRHIADLAGNSEVILPVPAFNVINGGSHAGNKLAMQEFMILPVGAANFREAMRIGAEVYHNLKNVIKEKYGKDATNVGDEGGFAPNILENKEGLELLKTAIGKAGYTDKVVIGMDVAASEFFRSGKYDLDFKSPDDPSRYISPDQLADLYKSFIKDYPVVSIEDPFDQDDWGAWQKFTASAGIQVVGDDLTVTNPKRIAKAVNEKSCNCLLLKVNQIGSVTESLQACKLAQANGWGVMVSHRSGETEDTFIADLVVGLCTGQIKTGAPCRSERLAKYNQLLRIEEELGSKAKFAGRNFRNPLAK

SEQ ID NO: 62 - protein, 586 aa, Homo sapiens
MPKPINVRVTTMDAELEFAIQPNTTGKQLFDQVVKTIGLREVWYFGLHYVDNKGFPTWLKLDKKVSAQEVRKENPLQFKFRAKFYPEDVAEELIQDITQKLFFLQVKEGILSDEIYCPPETAVLLGSYAVQAKFGDYNKEVHKSGYLSSERLIPQRVMDQHKLTRDQWEDRIQVWHAEHRGMLKDNAMLEYLKIAQDLEMYGINYFEIKNKKGTDLWLGVDALGLNIYEKDDKLTPKIGFPWSEIRNISFNDKKFVIKPIDKKAPDFVFYAPRLRINKRILQLCMGNHELYMRRRKPDTIEVQQMKAQAREEKHQKQLERQQLETEKKRRETVEREKEQMMREKEELMLRLQDYEEKTKKAERELSEQIQRALQLEEERKRAQEEAERLEADRMAALRAKEELERQAVDQIKSQEQLAAELAEYTAKIALLEEARRRKEDEVEEWQHRAKEAQDDLVKTKEELHLVMTAPPPPPPPVYEPVSYHVQESLQDEGAEPTGYSAELSSEGIRDDRNEEKRITEAEKNERVQRQLLTLSSELSQARDENKRTHNDIIHNENMRQGRDKYKTLRQIRQGNTKQRIDEFEAL

SEQ ID NO: 63 - protein, 697 aa, Homo sapiens
MGPDRKEVPLSRGTQAVVVGKGRGAPGDDSSMGGRPSSPLDKQQRQHLRGQVDTLLRNFLPCYRGQLAASVLRQISRELGPQEPTGSQLLRSKKLPRVREHRGPLTQLRGHPPRWQPIFCVLRGDGRLEWFSHKEEYENGGHCLGSTALTGYTLLTSQREYLRLLDALCPESLGDHTQEEPDSLLEVPVSFPLFLQHPFRRHLCFSAATREAQHAWRLALQGGIRLQGIVLQRSQAPAARAFLDAVRLYRQHQGHFGDDDVTLGSDAEVLTAVLMREQLPALRAQTLPGLRGAGRARAWAWTELLDAVHAAVLAGASAGLCAFQPEKDELLASLEKTIRPDVDQLLRQRARVAGRLRTDIRGPLESCLRREVDPQLPRVVQTLLRTVEASLEAVRTLLAQGMDRLSHRLRQSPSGTRLRREVYSFGEMPWDLALMQTCYREAERSRGRLGQLAAPFGFLGMQSLVFGAQDLAQQLMADAVATFLQLADQCLTTALNCDQAAQRLERVRGRVLKKFKSDSGLAQRRFIRGWGLCIFLPFVLSQLEPGCKKELPEFEGDVLAVGSQALTTEGIYEDVIRGCLLQRIDQELKKTLGANDVSCTLDGCLEVPWEQEGAAPNLNLVSSFLAGRQAFTDFLCLPAKSSANWILAASLLSCSCFRSGFHRDSRVFLVQLAEGLSHSLETVSSHSVWSFRPTPRQ

SEQ ID NO: 64 - protein, 760 aa, Homo sapiens
MKTWVKIVFGVATSAVLALLVMCIVLRPSRVHNSEENTMRALTLKDILNGTFSYKTFFPNWISGQEYLHQSADNNIVLYNIETGQSYTILSNRTMKSVNASNYGLSPDRQFVYLESDYSKLWRYSYTATYYIYDLSNGEFVRGNELPRPIQYLCWSPVGSKLAYVYQNNIYLKQRPGDPPFQITFNGRENKIFNGIPDWVYEEEMLATKYALWWSPNGKFLAYAEFNDTDIPVIAYSYYGDEQYPRTINIPYPKAGAKNPVVRIFIIDTTYPAYVGPQEVPVPAMIASSDYYFSWLTWVTDERVCLQWLKRVQNVSVLSICDFREDWQTWDCPKTQEHIEESRTGWAGGFFVSTPVFSYDAISYYKIFSDKDGYKHIHYIKDTVENAIQITSGKWEAINIFRVTQDSLFYSSNEFEEYPGRRNIYRISIGSYPPSKKCVTCHLRKERCQYYTASFSDYAKYYALVCYGPGIPISTLHDGRTDQEIKILEENKELENALKNIQLPKEEIKKLEVDEITLWYKMILPPQFDRSKKYPLLIQVYGGPCSQSVRSVFAVNWISYLASKEGMVIALVDGRGTAFQGDKLLYAVYRKLGVYEVEDQITAVRKFIEMGFIDEKRIAIWGWSYGGYVSSLALASGTGLFKCGIAVAPVSSWEYYASVYTERFMGLPTKDDNLEHYKNSTVMARAEYFRNVDYLLIHGTADDNVHFQNSAQIAKALVNAQVDFQAMWYSDQNHGLSGLSTNHLYTHMTHFLKQCFSLSD

SEQ ID NO: 65 - protein, 387 aa, Homo sapiens
MAGSEPRSGTNSPPPPFSDWGRLEAAILSGWKTFWQSVSKERVARTTSREEVDEAASTLTRLPIDVQLYILSFLSPHDLCQLGSTNHYWNETVRDPILWRYFLLRDLPSWSSVDWKSLPDLEILKKPISEVTDGAFFDYMAVYRMCCPYTRRASKSSRPMYGAVTSFLHSLIIQNEPRFAMFGPGLEELNTSLVLSLMSSEELCPTAGLPQRQIDGIGSGVNFQLNNQHKFNILILYSTTRKERDRAREEHTSAVNKMFSRHNEGDDQQGSRYSVIPQIQKVCEVVDGFIYVANAEAHKRHEWQDEFSHIMAMTDPAFGSSGRPLLVLSCISQGDVKRMPCFYLAHELHLNLLNHPWLVQDTEAETLTGFLNGIEWILEEVESKRAR

SEQ ID NO: 66 - protein, 491 aa, Homo sapiens
MKRMVSWSFHKLKTMKHLLLLLLCVFLVKSQGVNDNEEGFFSARGHRPLDKKREEAPSLRPAPPPISGGGYRARPAKAAATQKKVERKAPDAGGCLHADPDLGVLCPTGCQLQEALLQQERPIRNSVDELNNNVEAVSQTSSSSFQYMYLLKDLWQKRQKQVKDNENVVNEYSSELEKHQLYIDETVNSNIPTNLRVLRSILENLRSKIQKLESDVSAQMEYCRTPCTVSCNIPVVSGKECEEIIRKGGETSEMYLIQPDSSVKPYRVYCDMNTENGGWTVIQNRQDGSVDFGRKWDPYKQGFGNVATNTDGKNYCGLPGEYWLGNDKISQLTRMGPTELLIEMEDWKGDKVKAHYGGFTVQNEANKYQISVNKYRGTAGNALMDGASQLMGENRTMTIHNGMFFSTYDRDNDGWLTSDPRKQCSKEDGGGWWYNRCHAANPNGRYYWGGQYTWDMAKHGTDDGVVWMNWKGSWYSMRKMSMKIRPFFPQQ

SEQ ID NO: 67 - protein, 453 aa, Homo sapiens
MSWSLHPRNLILYFYALLFLSSTCVAYVATRDNCCILDERFGSYCPTTCGIADFLSTYQTKVDKDLQSLEDILHQVENKTSEVKQLIKAIQLTYNPDESSKPNMIDAATLKSRKMLEEIMKYEASILTHDSSIRYLQEIYNSNNQKIVNLKEKVAQLEAQCQEPCKDTVQIHDITGKDCQDIANKGAKQSGLYFIKPLKANQQFLVYCEIDGSGNGWTVFQKRLDGSVDFKKNWIQYKEGFGHLSPTGTTEFWLGNEKIHLISTQSAIPYALRVELEDWNGRTSTADYAMFKVGPEADKYRLTYAYFAGGDAGDAFDGFDFGDDPSDKFFTSHNGMQFSTWDNDNDKFEGNCAEQDGSGWWMNKCHAGHLNGVYYQGGTYSKASTPNGYDNGIIWATWKTRWYSMKKTTMKIIPFNRLTIGEGQQHHLGGAKQVRPEHPAETEYDSLYPEDDL

SEQ ID NO: 68 - protein, 323 aa, Homo sapiens
MAEKFDCHYCRDPLQGKKYVQKDGHHCCLKCFDKFCANTCVECRKPIGADSKEVHYKNRFWHDTCFRCAKCLHPLANETFVAKDNKILCNKCTTREDSPKCKGCFKAIVAGDQNVEYKGTVWHKDCFTCSNCKQVIGTGSFFPKGEDFYCVTCHETKFAKHCVKCNKAITSGGITYQDQPWHADCFVCVTCSKKLAGQRFTAVEDQYYCVDCYKNFVAKKCAGCKNPITGKRTVSRVSHPVSKARKPPVCHGKRLPLTLFPSANLRGRHPGGERTCPSWVVVLYRKNRSLAAPRGPGLVKAPVWWPMKDNPGTTTASTAKNAP

SEQ ID NO: 69 - protein, 2647 aa, Homo sapiens
MSSSHSRAGQSAAGAAPGGGVDTRDAEMPATEKDLAEDAPWKKIQQNTFTRWCNEHLKCVSKRIANLQTDLSDGLRLIALLEVLSQKKMHRKHNQRPTFRQMQLENVSVALEFLDRESIKLVSIDSKAIVDGNLKLILGLIWTLILHYSISMPMWDEEEDEEAKKQTPKQRLLGWIQNKLPQLPITNFSRDWQSGRALGALVDSCAPGLCPDWDSWDASKPVTNAREAMQQADDWLGIPQVITPEEIVDPNVDEHSVMTYLSQFPKAKLKPGAPLRPKLNPKKARAYGPGIEPTGNMVKKRAEFTVETRSAGQGEVLVYVEDPAGHQEEAKVTANNDKNRTFSVWYVPEVTGTHKVTVLFAGQHIAKSPFEVYVDKSQGDASKVTAQGPGLEPSGNIANKTTYFEIFTAGAGTGEVEVVIQDPMGQKGTVEPQLEARGDSTYRCSYQPTMEGVHTVHVTFAGVPIPRSPYTVTVGQACNPSACRAVGRGLQPKGVRVKETADFKVYTKGAGSGELKVTVKGPKGEERVKQKDLGDGVYGFEYYPMVPGTYIVTITWGGQNIGRSPFEVKVGTECGNQKVRAWGPGLEGGVVGKSADFVVEAIGDDVGTLGFSVEGPSQAKIECDDKGDGSCDVRYWPQEAGEYAVHVLCNSEDIRLSPFMADIRDAPQDFHPDRVKARGPGLEKTGVAVNKPAEFTVDAKHGGKAPLRVQVQDNEGCPVEALVKDNGNGTYSCSYVPRKPVKHTAMVSWGGVSIPNSPFRVNVGAGSHPNKVKVYGPGVAKTGLKAHEPTYFTVDCAEAGQGDVSIGIKCAPGVVGPAEADIDFDIIRNDNDTFTVKYTPRGAGSYTIMVLFADQATPTSPIRVKVEPSHDASKVKAEGPGLSRTGVELGKPTHFTVNAKAAGKGKLDVQFSGLTKGDAVRDVDIIDHHDNTYTVKYTPVQQGPVGVNVTYGGDPIPKSPFSVAVSPSLDLSKIKVSGLGEKVDVGKDQEFTVKSKGAGGQGKVASKIVGPSGAAVPCKVEPGLGADNSVVRFLPREEGPYEVEVTYDGVPVPGSPFPLEAVAPTKPSKVKAFGPGLQGGSAGSPARFTIDTKGAGTGGLGLTVEGPCEAQLECLDNGDGTCSVSYVPTEPGDYNINILFADTHIPGSPFKAHVVPCFDASKVKCSGPGLERATAGEVGQFQVDCSSAGSAELTIEICSEAGLPAEVYIQDHGDGTHTITYIPLCPGAYTVTIKYGGQPVPNFPSKLQVEPAVDTSGVQCYGPGIEGQGVFREATTEFSVDARALTQTGGPHVKARVANPSGNLTETYVQDRGDGMYKVEYTPYEEGLHSVDVTYDGSPVPSSPFQVPVTEGCDPSRVRVHGPGIQSGTTNKPNKFTVETRGAGTGGLGLAVEGPSEAKMSCMDNKDGSCSVEYIPYEAGTYSLNVTYGGHQVPGSPFKVPVHDVTDASKVKCSGPGLSPGMVRANLPQSFQVDTSKAGVAPLQVKVQGPKGLVEPVDVVDNADGTQTVNYVPSREGPYSISVLYGDEEVPRSPFKVKVLPTHDASKVKASGPGLNTTGVPASLPVEFTIDAKDAGEGLLAVQITDPEGKPKKTHIQDNHDGTYTVAYVPDVTGRYTILIKYGGDEIPFSPYRVRAVPTGDASKCTVTVSIGGHGLGAGIGPTIQIGEETVITVDTKAAGKGKVTCTVCTPDGSEVDVDVVENEDGTFDIFYTAPQPGKYVICVRFGGEHVPNSPFQVTALAGDQPSVQPPLRSQQLAPQYTYAQGGQQTWAPERPLVGVNGLDVTSLRPFDLVIPFTIKKGEITGEVRMPSGKVAQPTITDNKDGTVTVRYAPSEAGLHEMDIRYDNMHIPGSPLQFYVDYVNCGHVTAYGPGLTHGVVNKPATFTVNTKDAGEGGLSLAIEGPSKAEISCTDNQDGTCSVSYLPVLPGDYSILVKYNEQHVPGSPFTARVTGDDSMRMSHLKVGSAADIPINISETDLSLLTATVVPPSGREEPCLLKRLRNGHVGISFVPKETGEHLVHVKKNGQHVASSPIPVVISQSEIGDASRVRVSGQGLHEGHTFEPAEFIIDTRDAGYGGLSLSIEGPSKVDINTEDLEDGTCRVTYCPTEPGNYIINIKFADQHVPGSPFSVKVTGEGRVKESITRRRRAPSVANVGSHCDLSLKIPEISIQDMTAQVTSPSGKTHEAEIVEGENHTYCIRFVPAEMGTHTVSVKYKGQHVPGSPFQFTVGPLGEGGAHKVRAGGPGLERAEAGVPAEFSIWTREAGAGGLAIAVEGPSKAEISFEDRKDGSCGVAYVVQEPGDYEVSVKFNEEHIPDSPFVVPVASPSGDARRLTVSSLQESGLKVNQPASFAVSLNGAKGAIDAKVHSPSGALEECYVTEIDQDKYAVRFIPRENGVYLIDVKFNGTHIPGSPFKIRVGEPGHGGDPGLVSAYGAGLEGGVTGNPAEFVVNTSNAGAGALSVTIDGPSKVKMDCQECPEGYRVTYTPMAPGSYLISIKYGGPYHIGGSPFKAKVTGPRLVSNHSLHETSSVFVDSLTKATCAPQHGAPGPGPADASKVVAKGLGLSKAYVGQKSSFTVDCSKAGNNMLLVGVHGPRTPCEEILVKHVGSRLYSVSYLLKDKGEYTLVVKWGDEHIPGSPYRVVVP

SEQ ID NO: 70 - protein, 597 aa, Homo sapiens
MFASCHCVPRGRRTMKMIHFRSSSVKSLSQEMRCTIRLLDDSEISCHIQRETKGQFLIDHICNYYSLLEKDYFGIRYVDPEKQRHWLEPNKSIFKQMKTHPPYTMCFRVKFYPHEPLKIKEELTRYLLYLQIKRDIFHGRLLCSFSDAAYLGACIVQAELGDYDPDEHPENYISEFEIFPKQSQKLERKIVEIHKNELRGQSPPVAEFNLLLKAHTLETYGVDPHPCKDSTGTTTFLGFTAAGFVVFQGNKRIHLIKWPDVCKLKFEGKTFYVIGTQKEKKAMLAFHTSTPAACKHLWKCGVENQAFYKYAKSSQIKTVSSSKIFFKGSRFRYSGKVAKEVVEASSKIQREPPEVHRANITQSRSSHSLNKQLIINMEPLQPLLPSPSEQEEELPLGEGVPLPKEENISAPLISSSPVKAAREYEDPPSEEEDKIKEEPLTISELVYNPSASLLPTPVDDDEIDMLFDCPSRLELEREDTDSFEDLEADENAFLIAEEEELKEARRALSWSYDILTGHIRVNPLVKSFSRLLVVGLGLLLFVFPLLLLLLESGIDLSFLCEIRQTPEFEQFHYEYYCPLKEWVAGKVHLILYMLGCS

SEQ ID NO: 71 - protein, 183 aa, Homo sapiens
MTTASTSQVRQNYHQDSEAAINRQINLELYASYVYLSMSYYFDRDDVALKNFAKYFLHQSHEEREHAEKLMKLQNQRGGRIFLQDIKKPDCDDWESGLNAMECALHLEKNVNQSLLELHKLATDKNDPHLCDFIETHYLNEQVKAIKELGDHVTNLRKMGAPESGLAEYLFDKHTLGDSDNES

SEQ ID NO: 72 - protein, 175 aa, Homo sapiens
MSSQIRQNYSTDVEAAVNSLVNLYLQASYTYLSLGFYFDRDDVALEGVSHFFRELAEEKREGYERLLKMQNQRGGRALFQDIKKPAEDEWGKTPDAMKAAMALEKKLNQALLDLHALGSARTDPHLCDFLETHFLDEEVKLIKKMGDHLTNLHRLGGPEAGLGEYLFERLTLKHD

SEQ ID NO: 73 - protein, 466 aa, Homo sapiens
MRAPGMRSRPAGPALLLLLLFLGAAESVRRAQPPRRYTPDWPSLDSRPLPAWFDEAKFGVFIHWGVFSVPAWGSEWFWWHWQGEGRPQYQRFMRDNYPPGFSYADFGPQFTARFFHPEEWADLFQAAGAKYVVLTTKHHEGFTNWPSPVSWNWNSKDVGPHRDLVGELGTALRKRNIRYGLYHSLLEWFHPLYLLDKKNGFKTQHFVSAKTMPELYDLVNSYKPDLIWSDGEWECPDTYWNSTNFLSWLYNDSPVKDEVVVNDRWGQNCSCHHGGYYNCEDKFKPQSLPDHKWEMCTSIDKFSWGYRRDMALSDVTEESEIISELVQTVSLGGNYLLNIGPTKDGLIVPIFQERLLAVGKWLSINGEAIYASKPWRVQWEKNTTSVWYTSKGSAVYAIFLHWPENGVLNLESPITTSTTKITMLGIQGDLKWSTDPDKGLFISLPQLPPSAVPAEFAWTIKLTGVK

SEQ ID NO: 74 - protein, 456 aa, Homo sapiens
MRKSPGLSDCLWAWILLLSTLTGRSYGQPSLQDELKDNTTVFTRILDRLLDGYDNRLRPGLGERVTEVKTDIFVTSFGPVSDHDMEYTIDVFFRQSWKDERLKFKGPMTVLRLNNLMASKIWTPDTFFHNGKKSVAHNMTMPNKLLRITEDGTLLYTMRLTVRAECPMHLEDFPMDAHACPLKFGSYAYTRAEVVYEWTREPARSVVVAEDGSRLNQYDLLGQTVDSGIVQSSTGEYVVMTTHFHLKRKIGYFVIQTYLPCIMTVILSQVSFWLNRESVPARTVFGVTTVLTMTTLSISARNSLPKVAYATAMDWFIAVCYAFVFSALIEFATVNYFTKRGYAWDGKSVVPEKPKKVKDPLIKKNNTYAPTATSYTPNLARGDPGLATIAKSATIEPKEVKPETKPPEPKKTFNSVSKIDRLSRIAFPLLFGIFNLVYWATYLNREPQLKAPTPHQ

SEQ ID NO: 75 - protein, 335 aa, Homo sapiens
MGKVKVGVNGFGRIGRLVTRAAFNSGKVDIVAINDPFIDLNYMVYMFQYDSTHGKFHGTVKAENGKLVINGNPITIFQERDPSKIKWGDAGAEYVVESTGVFTTMEKAGAHLQGGAKRVIISAPSADAPMFVMGVNHEKYDNSLKIISNASCTTNCLAPLAKVIHDNFGIVEGLMTTVHAITATQKTVDGPSGKLWRDGRGALQNIIPASTGAAKAVGKVIPELNGKLTGMAFRVPTANVSVVDLTCRLEKPAKYDDIKKVVKQASEGPLKGILGYTEHQVVSSDFNSDTHSSTFDAGAGIALNDHFVKLISWYDNEFGYSNRVVDLMAHMASKE

SEQ ID NO: 76 - protein, 739 aa, Homo sapiens
MPSPRPVLLRGARAALLLLLPPRLLARPSLLLRRSLSAASCPPISLPAAASRSSMDGAGAEEVLAPLRLAVRQQGDLVRKLKEDKAPQVDVDKAVAELKARKRVLEAKELALQPKDDIVDRAKMEDTLKRRFFYDQAFAIYGGVSGLYDFGPVGCALKNNIIQTWRQHFIQEEQILEIDCTMLTPEPVLKTSGHVDKFADFMVKDVKNGECFRADHLLKAHLQKLMSDKKCSVEKKSEMESVLAQLDNYGQQELADLFVNYNVKSPITGNDLSPPVSFNLMFKTFIGPGGNMPGYLRPETAQGIFLNFKRLLEFNQGKLPFAAAQIGNSFRNEISPRSGLIRVREFTMAEIEHFVDPSEKDHPKFQNVADLHLYLYSAKAQVSGQSARKMRLGDAVEQGVINNTVLGYFIGRIYLYLTKVGISPDKLRFRQHMENEMAHYACDCWDAESKTSYGWIEIVGCADRSCYDLSCHARATKVPLVAEKPLKEPKTVNVVQFEPSKGAIGKAYKKDAKLVMEYLAICDECYITEMEMLLNEKGEFTIETEGKTFQLTKDMINVKRFQKTLYVEEVVPNVIEPSFGLGRIMYTVFEHTFHVREGDEQRTFFSFPAVVAPFKCSVLPLSQNQEFMPFVKELSEALTRHGVSHKVDDSSGSIGRRYARTDEIGVAFGVTIDFDTVNKTPHTATLRDRDSMRQIRAEISELPSIVQDLANGNITWADVEARYPLFEGQETGKKETIEE

SEQ ID NO: 77 - protein, 308 aa, Homo sapiens
MPGQELRTVNGSQMLLVLLVLSWLPHGGALSLAEASRASFPGPSELHSEDSRFRELRKRYEDLLTRLRANQSWEDSNTDLVPAPAVRILTPEVRLGSGGHLHLRISRAALPEGLPEASRLHRALFRLSPTASRSWDVTRPLRRQLSLARPQAPALHLRLSPPPSQSDQLLAESSSARPQLELHLRPQAARGRRRARARNGDHCPLGPGRCCRLHTVRASLEDLGWADWVLSPREVQVTMCIGACPSQFRAANMHAQIKTSLHRLKPDTVPAPCCVPASYNPMVLIQKTDTGVSLQTYDDLLAKDCHCI

SEQ ID NO: 78 - protein, 782 aa, Homo sapiens
MAPHRPAPALLCALSLALCALSLPVRAATASRGASQAGAPQGRVPEARPNSMVVEHPEFLKAGKEPGLQIWRVEKFDLVPVPTNLYGDFFTGDAYVILKTVQLRNGNLQYDLHYWLGNECSQDESGAAAIFTVQLDDYLNGRAVQHREVQGFESATFLGYFKSGLKYKKGGVASGFKHVVPNEVVVQRLFQVKGRRVVRATEVPVSWESFNNGDCFILDLGNNIHQWCGSNSNRYERLKATQVSKGIRDNERSGRARVHVSEEGTEPEAMLQVLGPKPALPAGTEDTAKEDAANRKLAKLYKVSNGAGTMSVSLVADENPFAQGALKSEDCFILDHGKDGKIFVWKGKQANTEERKAALKTASDFITKMDYPKQTQVSVLPEGGETPLFKQFFKNWRDPDQTDGLGLSYLSSHIANVERVPFDAATLHTSTAMAAQHGMDDDGTGQKQIWRIEGSNKVPVDPATYGQFYGGDSYIILYNYRHGGRQGQIIYNWQGAQSTQDEVAASAILTAQLDEELGGTPVQSRVVQGKEPAHLMSLFGGKPMIIYKGGTSREGGQTAPASTRLFQVRANSAGATRAVEVLPKAGALNSNDAFVLKTPSAAYLWVGTGASEAEKTGAQELLRVLRAQPVQVAEGSEPDGFWEALGGKAAYRTSPRLKDKKMDAHPPRLFACSNKIGRFVIEEVPGELMQEDLATDDVMLLDTWDQVFVWVGKDSQEEEKTEALTSAKRYIETDPANRDRRTPITVVKQGFEPPSFVGWFLGWDDDYWSVDPLDRAMAELAA

SEQ ID NO: 79 - protein, 210 aa, Homo sapiens
MPPYTVVYFPVRGRCAALRMLLADQGQSWKEEVVTVETWQEGSLKASCLYGQLPKFQDGDLTLYQSNTILRHLGRTLGLYGKDQQEAALVDMVNDGVEDLRCKYISLIYTNYEAGKDDYVKALPGQLKPFETLLSQNQGGKTFIVGDQISFADYNLLDLLLIHEVLAPGCLDAFPLLSAYVGRLSARPKLKAFLASPEYVNLPINGNGKQ

SEQ ID NO: 80 - protein, 560 aa, Homo sapiens
MFARMSDLHVLLLMALVGKTACGFSLMSLLESLDPDWTPDQYDYSYEDYNQEENTSSTLTHAENPDWYYTEDQADPCQPNPCEHGGDCLVHGSTFTCSCLAPFSGNKCQKVQNTCKDNPCGRGQCLITQSPPYYRCVCKHPYTGPSCSQVVPVCRPNPCQNGATCSRHKRRSKFTCACPDQFKGKFCEIGSDDCYVGDGYSYRGKMNRTVNQHACLYWNSHLLLQENYNMFMEDAETHGIGEHNFCRNPDADEKPWCFIKVTNDKVKWEYCDVSACSAQDVAYPEESPTEPSTKLPGFDSCGKTEIAERKIKRIYGGFKSTAGKHPWQASLQSSLPLTISMPQGHFCGGALIHPCWVLTAAHCTDIKTRHLKVVLGDQDLKKEEFHEQSFRVEKIFKYSHYNERDEIPHNDIALLKLKPVDGHCALESKYVKTVCLPDGSFPSGSECHISGWGVTETGKGSRQLLDAKVKLIANTLCNSRQLYDHMIDDSMICAGNLQKPGQDTCQGDSGGPLTCEKDGTYYVYGIVSWGLECGKRPGVYTQVTKFLNWIKATIKSESGF

SEQ ID NO: 81 - protein, 728 aa, Homo sapiens
MWVTKLLPALLLQHVLLHLLLLPIAIPYAEGQRKRRNTIHEFKKSAKTTLIKIDPALKIKTKKVNTADQCANRCTRNKGLPFTCKAFVFDKARKQCLWFPFNSMSSGVKKEFGHEFDLYENKDYIRNCIIGKGRSYKGTVSITKSGIKCQPWSSMIPHEHSFLPSSYRGKDLQENYCRNPRGEEGGPWCFTSNPEVRYEVCDIPQCSEVECMTCNGESYRGLMDHTESGKICQRWDHQTPHRHKFLPERYPDKGFDDNYCRNPDGQPRPWCYTLDPHTRWEYCAIKTCADNTMNDTDVPLETTECIQGQGEGYRGTVNTIWNGIPCQRWDSQYPHEHDMTPENFKCKDLRENYCRNPDGSESPWCFTTDPNIRVGYCSQIPNCDMSHGQDCYRGNGKNYMGNLSQTRSGLTCSMWDKNMEDLHRHIFWEPDASKLNENYCRNPDDDAHGPWCYTGNPLIPWDYCPISRCEGDTTPTIVNLDHPVISCAKTKQLRVVNGIPTRTNIGWMVSLRYRNKHICGGSLIKESWVLTARQCFPSRDLKDYEAWLGIHDVHGRGDEKCKQVLNVSQLVYGPEGSDLVLMKLARPAVLDDFVSTIDLPNYGCTIPEKTSCSVYGWGYTGLINYDGLLRVAHLYIMGNEKCSQHHRGKVTLNESEICAGAEKIGSGPCEGDYGGPLVCEQHKMRMVLGVIVPGRGCAIPNRPGIFVRVAYYAKWIHKIILTYKVPQS

SEQ ID NO: 82 - protein, 365 aa, Homo sapiens [sequence omitted]

SEQ ID NO: 83 - protein, 215 aa, Homo sapiens
MGKGDPKKPRGKMSSYAFFVQTCREEHKKKHPDASVNFSEFSKKCSERWKTMSAKEKGKFEDMAKADKARYEREMKTYIPPKGETKKKFKDPNAPKRPPSAFFLFCSEYRPKIKGEHPGLSIGDVAKKLGEMWNNTAADDKQPYEKKAAKLKEKYEKDIAAYRAKGKPDAAKKGVVKAEKSKKKKEEEEDEEDEEDEEEEEDEEDEDEEEDDDDE

SEQ ID NO: 84 - protein, 372 aa, Homo sapiens
MSKSESPKEPEQLRKLFIGGLSFETTDESLRSHFEQWGTLTDCVVMRDPNTKRSRGFGFVTYATVEEVDAAMNARPHKVDGRVVEPKRAVSREDSQRPGAHLTVKKIFVGGIKEDTEEHHLRDYFEQYGKIEVIEIMTDRGSGKKRGFAFVTFDDHDSVDKIVIQKYHTVNGHNCEVRKALSKQEMASASSSQRGRSGSGNFGGGRGGGFGGNDNFGRGGNFSGRGGFGGSRGGGGYGGSGDGYNGFGNDGGYGGGGPGYSGGSRGYGSGGQGYGNQGSGYGGSGSYDSYNNGGGGGFGGGSGSNFGGGGSYNDFGNYNNQSSNFGPMKGGNFGGRSSGPYGGGGQYFAKPRNQGGYGGSSSSSSYGSGRRF

SEQ ID NO: 85 - protein, 353 aa, Homo sapiens
MEKTLETVPLERKKREKEQFRKLFIGGLSFETTEESLRNYYEQWGKLTDCVVMRDPASKRSRGFGFVTFSSMAEVDAAMAARPHSIDGRVVEPKRAVAREESGKPGAHVTVKKLFVGGIKEDTEEHHLRDYFEEYGKIDTIEIITDRQSGKKRGFGFVTFDDHDPVDKIVLQKYHTINGHNAEVRKALSRQEMQEVQSSRSGRGGNFGFGDSRGGGGNFGPGPGSNFRGGSDGYGSGRGFGDGYNGYGGGPGGGNFGGSPGYGGGRGGYGGGGPGYGNQGGGYGGGYDNYGGGNYGSGNYNDFGNYNQQPSNYGPMKSGNFGGSRNMGGPYGGGNYGPGGSGGSGGYGGRSRY

SEQ ID NO: 86 - protein, 415 aa, Homo sapiens
MMLGPEGGEGFVVKLRGLPWSCSVEDVQNFLSDCTIHDGAAGVHFIYTREGRQSGEAFVELGSEDDVKMALKKDRESMGHRYIEVFKSHRTEMDWVLKHSGPNSADSANDGFVRLRGLPFGCTKEEIVQFFSGLEIVPNGITLPVDPEGKITGEAFVQFASQELAEKALGKHKERIGHRYIEVFKSSQEEVRSYSDPPLKFMSVQRPGPYDRPGTARRYIGIVKQAGLERMRPGAYSTGYGGYEEYSGLSDGYGFTTDLFGRDLSYCLSGMYDHRYGDSEFTVQSTTGHCVHMRGLPYKATENDIYNFFSPLNPVRVHIEIGPDGRVTGEADVEFATHEEAVAAMSKDRANMQHRYIELFLNSTTGASNGAYSSQVMQGMGVSAAQATYSGLESQSVSGCYGAGYSGQNSMGGYD

SEQ ID NO: 87 - protein, 406 aa, Homo sapiens
MSALGAVIALLLWGQLFAVDSGNDVTDIADDGCPKPPEIAHGYVEHSVRYQCKNYYKLRTEGDGVYTLNDKKQWINKAVGDKLPECEADDGCPKPPEIAHGYVEHSVRYQCKNYYKLRTEGDGVYTLNNEKQWINKAVGDKLPECEAVCGKPKNPANPVQRILGGHLDAKGSFPWQAKMVSHHNLTTGATLINEQWLLTTAKNLFLNHSENATAKDIAPTLTLYVGKKQLVEIEKVVLHPNYSQVDIGLIKLKQKVSVNERVMPICLPSKDYAEVGRVGYVSGWGRNANFKFTDHLKYVMLPVADQDQCIRHYEGSTVPEKKTPKSPVGVQPILNEHTFCAGMSKYQEDTCYGDAGSAFAVHDLEEDTWYATGILSFDKSCAVAEYGVYVKVTSIQDWVQKTIAEN

SEQ ID NO: 88 - protein, 724 aa, Homo sapiens
MPEEVHHGEEEVETFAFQAEIAQLMSLIINTFYSNKEIFLRELISNASDALDKIRYESLTDPSKLDSGKELKIDIIPNPQERTLTLVDTGIGMTKADLINNLGTIAKSGTKAFMEALQAGADISMIGQFGVGFYSAYLVAEKVVVITKHNDDEQYAWESSAGGSFTVRADHGEPIGRGTKVILHLKEDQTEYLEERRVKEVVKKHSQFIGYPITLYLEKEREKEISDDEAEEEKGEKEEEDKDDEEKPKIEDVGSDEEDDSGKDKKKKTKKIKEKYIDQEELNKTKPIWTRNPDDITQEEYGEFYKSLTNDWEDHLAVKHFSVEGQLEFRALLFIPRRAPFDLFENKKKKNNIKLYVRRVFIMDSCDELIPEYLNFIRGVVDSEDLPLNISREMLQQSKILKVIRKNIVKKCLELFSELAEDKENYKKFYEAFSKNLKLGIHEDSTNRRRLSELLRYHTSQSGDEMTSLSEYVSRMKETQKSIYYITGESKEQVANSAFVERVRKRGFEVVYMTEPIDEYCVQQLKEFDGKSLVSVTKEGLELPEDEEEKKKMEESKAKFENLCKLMKEILDKKVEKVTISNRLVSSPCCIVTSTYGWTANMERIMKAQALRDNSTMGYMMAKKHLEINPDHPIVETLRQKAEADKNDKAVKDLVVLLFETALLSSGFSLEDPQTHSNRIYRMIKLGLGIDEDEVAAEEPNAAVPDEIPPLEGDEDASRMEEVD

SEQ ID NO: 89 - protein, 803 aa, Homo sapiens
MRALWVLGLCCVLLTFGSVRADDEVDVDGTVEEDLGKSREGSRTDDEVVQREEEAIQLDGLNASQIRELREKSEKFAFQAEVNRMMKLIINSLYKNKEIFLRELISNASDALDKIRLISLTDENALSGNEELTVKIKCDKEKNLLHVTDTGVGMTREELVKNLGTIAKSGTSEFLNKMTEAQEDGQSTSELIGQFGVGFYSAFLVADKVIVTSKHNNDTQHIWESDSNEFSVIADPRGNTLGRGTTITLVLKEEASDYLELDTIKNLVKKYSQFINFPIYVWSSKTETVEEPMEEEEAAKEEKEESDDEAAVEEEEEEKKPKTKKVEKTVWDWELMNDIKPIWQRPSKEVEEDEYKAFYKSFSKESDDPMAYIHFTAEGEVTFKSILFVPTSAPRGLFDEYGSKKSDYIKLYVRRVFITDDFHDMMPKYLNFVKGVVDSDDLPLNVSRETLQQHKLLKVIRKKLVRKTLDMIKKIADDKYNDTFWKEFGTNIKLGVIEDHSNRTRLAKLLRFQSSHHPTDITSLDQYVERMKEKQDKIYFMAGSSRKEAESSPFVERLLKKGYEVIYLTEPVDEYCIQALPEFDGKRFQNVAKEGVKFDESEKTKESREAVEKEFEPLLNWMKDKALKDKIEKAVVSQRLTESPCALVASQYGWSGNMERIMKAQAYQTGKDISTNYYASQKKTFEINPRHPLIRDMLRRIKEDEDDKTVLDLAVVLFETATLRSGYLLPDTKAYGDRIERMLRLSLNIDPDAKVEEEPEEEPEETAEDTTEDTEQDEDEEMDVGTDEEEETAKESTAEKDEL

SEQ ID NO: 90 - protein, 679 aa, Homo sapiens
MISASRAAAARLVGAAASRGPTAARHQDSWNGLSHEAFRLVSRRDYASEAIKGAVVGIDLGTTNSCVAVMEGKQAKVLENAEGARTTPSVVAFTADGERLVGMPAKRQAVTNPNNTFYATKRLIGRRYDDPEVQKDIKNVPFKIVRASNGDAWVEAHGKLYSPSQIGAFVLMKMKETAENYLGHTAKNAVITVPAYFNDSQRQATKDAGQISGLNVLRVINEPTAAALAYGLDKSEDKVIAVYDLGGGTFDISILEIQKGVFEVKSTNGDTFLGGEDFDQALLRHIVKEFKRETGVDLTKDNMALQRVREAAEKAKCELSSSVQTDINLPYLTMDSSGPKHLNMKLTRAQFEGIVTDLIRRTIAPCQKAMQDAEVSKSDIGEVILVGGMTRMPKVQQTVQDLFGRAPSKAVNPDEAVAIGAAIQGGVLAGDVTDVLLLDVTPLSLGIETLGGVFTKLINRNTTIPTKKSQVFSTAADGQTQVEIKVCQGEREMAGDNKLLGQFTLIGIPPAPRGVPQIEVTFDIDANGIVHVSAKDKGTGREQQIVIQSSGGLSKDDIENMVKNAEKYAEEDRRKKERVEAVNMAEGIIHDTETKMEEFKDQLPADECNKLKEEISKMRELLARKDSETGENIRQAASSLQQASLKLFEMAYKKMASEREGSGSSGTGEQKEDQKEEKQ

SEQ ID NO: 91 - protein, 205 aa, Homo sapiens
MTERRVPFSLLRGPSWDPFRDWYPHSRLFDQAFGLPRLPEEWSQWLGGSSWPGYVRPLPPAAIESPAVAAPAYSRALSRQLSSGVSEIRHTADRWRVSLDVNHFAPDELTVKTKDGVVEITGKHEERQDEHGYISRCFTRKYTLPPGVDPTQVSSSLSPEGTLTVEAPMPKLATQSNEITIPVTFESRAQLGGPEAAKSDETAAK

SEQ ID NO: 92 - protein, 573 aa, Homo sapiens
MLRLPTVFRQMRPVSRVLAPHLTRAYAKDVKFGADARALMLQGVDLLADAVAVTMGPKGRTVIIEQSWGSPKVTKDGVTVAKSIDLKDKYKNIGAKLVQDVANNTNEEAGDGTTTATVLARSIAKEGFEKISKGANPVEIRRGVMLAVDAVIAELKKQSKPVTTPEEIAQVATISANGDKEIGNIISDAMKKVGRKGVITVKDGKTLNDELEIIEGMKFDRGYISPYFINTSKGQKCEFQDAYVLLSEKKISSIQSIVPALEIANAHRKPLVIIAEDVDGEALSTLVLNRLKVGLQVVAVKAPGFGDNRKNQLKDMAIATGGAVFGEEGLTLNLEDVQPHDLGKVGEVIVTKDDAMLLKGKGDKAQIEKRIQEIIEQLDVTTSEYEKEKLNERLAKLSDGVAVLKVGGTSDVEVNEKKDRVTDALNATRAAVEEGIVLGGGCALLRCIPALDSLTPANEDQKIGIEIIKRTLKIPAMTIAKNAGVEGSLIVEKIMQSSSEVGYDAMAGDFVNMVEKGIIDPTKVVRTALLDAAGVASLLTTAEVVVTEIPKEEKDPGMGAMGGMGGGMGGGMF

SEQ ID NO: 93 - protein, 317 aa, Homo sapiens
MKTALILLSILGMACAFSMKNLHRRVKIEDSEENGVFKYRPRYYLYKHAYFYPHLKRFPVQGSSDSSEENGDDSSEEEEEEEETSNEGENNEESNEDEDSEAENTTLSATTLGYGEDATPGTGYTGLAAIQLPKKAGDITNKATKEKESDEEEEEEEEGNENEESEAEVDENEQGINGTSTNSTEAENGNGSSGGDNGEEGEEESVTGANAEDTTETGRQGKGTSKTTTSPNGGFEPTTPPQVYRTTSPPFGKTTTVEYEGEYEYTGANEYDNGYEIYESENGEPRGDNYRAYEDEYSYFKGQGYDGYDGQNYYHHQ

SEQ ID NO: 94 - protein, 600 aa, Homo sapiens
MASNHKSSAARPVSRGGVGLTGRPPSGIRPLSGNIRVATAMPPGTARPGSRGCPIGTGGVLSSQIKVAHRPVTQQGLTGMKTGTKGPQRQILDKSYYLGLLRSKISELTTEVNKLQKGIEMYNQENSVYLSYEKRAETLAVEIKELQGQLADYNMLVDKLNTNTEMEEVMNDYNMLKAQNDRETQSLDVIFTERQAKEKQIRSVEEEIEQEKQATDDIIKNMSFENQVKYLEMKTTNEKLLQELDTLQQQLDSQNMKKESLEAEIAHSQVKQEAVLLHEKLYELESHRDQMIAEDKSIGSPMEEREKLLKQIKDDNQEIASMERQLTDTKEKINQFIEEIRQLDMDLEEHQGEMNQKYKELKKREEHMDTFIETFEETKNQELKRKAQIEANIVALLEHCSRNINRIEQISSITNQELKMMQDDLNFKSTEVQKSQSTAQNLTSDIQRLQLDLQKMELLESKMTEEQHSLKSKIKQMTTDLEIYNDLPALKSSGEEKIKKLHQERMILSTHRNAFKKIMEKQNIEYEALKTQLQENETHSQLTNLERKWQHLEQNNFAMKEFIATKSQESDYQPIKKNVTKQIAEYNKTIVDALHSTSGN

SEQ ID NO: 95 - protein, 195 aa, Homo sapiens
MGKISSLPTQLFKCCFCDFLKVKMHTMSSSHLFYLALCLLTFTSSATAGPETLCGAELVDALQFVCGDRGFYFNKPTGYGSSSRRAPQTGIVDECCFRSCDLRRLEMYCAPLKPAKSARSVRAQRHTDMPKTQKYQPPSTNKNTKSQRRKGWPKTHPGGEQKEGTEASLQIRGKKKEQRREIGSRNAECRGKKGK

SEQ ID NO: 96 - protein, 340 aa, Homo sapiens
ASPTSPKVFPLSLDSTPQDGNVVVACLVQGFFPQEPLSVTWSESGQNVTARNFPPSQDASGDLYTTSSQLTLPATQCPDGKSVTCHVKHYTNPSQDVTVPCPVPPPPPCCHPRLSLHRPALEDLLLGSEANLTCTLTGLRDASGATFTWTPSSGKSAVQGPPERDLCGCYSVSSVLPGCAQPWNHGETFTCTAAHPELKTPLTANITKSGNTFRPEVHLLPPPSEELALNELVTLTCLARGFSPKDVLVRWLQGSQELPREKYLTWASRQEPSQGTTTFAVTSILRVAAEDWKKGDTFSCMVGHEALPLAFTQKTIDRMAGKPTHVNVSVVMAEVDGTCY

SEQ ID NO: 97 - protein, 551 aa, Homo sapiens
MAAPALSWRLPLLILLLPLATSWASAAVNGTSQFTCFYNSRANISCVWSQDGALQDTSCQVHAWPDRRRWNQTCELLPVSQASWACNLILGAPDSQKLTTVDIVTLRVLCREGVRWRVMAIQDFKPFENLRLMAPISLQVVHVETHRCNISWEISQASHYFERHLEFEARTLSPGHTWEEAPLLTLKQKQEWICLETLTPDTQYEFQVRVKPLQGEFTTWSPWSQPLAFRTKPAALGKDTIPWLGHLLVGLSGAFGFIILVYLLINCRNTGPWLKKVLKCNTPDPSKFFSQLSSEHGGDVQKWLSSPFPSSSFSPGGLAPEISPLEVLERDKVTQLLLQQDKVPEPASLSSNHSLTSCFTNQGYFFFHLPDALEIEACQVYFTYDPYSEEDPDEGVAGAPTGSSPQPLQPLSGEDDAYCTFPSRDDLLLFSPSLLGGPSPPSTAPGGSGAGEERMPPSLQERVPRDWDPQPLGPPTPGVPDLVDFQPPPELVLREAGEEVPDAGPREGVSFPWSRPPGQGEFRALNARLPLNTDAYLSLQELQGQDPTHLV

SEQ ID NO: 98 - protein, 99 aa, Homo sapiens
MTSKLAVALLAAFLISAALCEGAVLPRSAKELRCQCIKTYSKPFHPKFIKELRVIESGPHCANTEIIVKLSDGRELCLDPKENWVQRVVEKFLKRAENS

SEQ ID NO: 99 - protein, 144 aa, Homo sapiens
MLLAMVLTSALLLCSVAGQGCPTLAGILDINFLINKMQEDPASKCHCSANVTSCLCLGIPSDNCTRPCFSERLSQMTNTTMQTRYPLIFSRVKKSVEVLKNNKCPYFSCEQPCNQTTAGNALTFLKSLLEIFQKEKMRGMRGKI

SEQ ID NO: 100 - protein, 189 aa, Homo sapiens [sequence omitted]

SEQ ID NO: 101 - protein, 400 aa, Homo sapiens
MTSYSYRQSSATSSFGGLGGGSVRFGPGVAFRAPSIHGGSGGRGVSVSSARFVSSSSSGAYGGGYGGVLTASDGLLAGNEKLTMQNLNDRLASYLDKVRALEAANGELEVKIRDWYQKQGPGPSRDYSHYYTTIQDLRDKILGATIENSRIVLQIDNARLAADDFRTKFETEQALRMSVEADINGLRRVLDELTLARTDLEMQIEGLKEELAYLKKNHEEEISTLRGQVGGQVSVEVDSAPGTDLAKILSDMRSQYEVMAEQNRKDAEAWFTSRTEELNREVAGHTEQLQMSRSEVTDLRRTLQGLEIELQSQLSMKAALEDTLAETEARFGAQLAHIQALISGIEAQLGDVRADSERQNQEYQRLMDIKSRLEQEIATYRSLLEGQEDHYNNLSASKVL

SEQ ID NO: 102 - protein, 483 aa, Homo sapiens
MSIRVTQKSYKVSTSGPRAFSSRSYTSGPGSRISSSSFSRVGSSNFRGGLGGGYGGASGMGGITAVTVNQSLLSPLVLEVDPNIQAVRTQEKEQIKTLNNKFASFIDKVRFLEQQNKMLETKWSLLQQQKTARSNMDNMFESYINNLRRQLETLGQEKLKLEAELGNMQGLVEDFKNKYEDEINKRTEMENEFVLIKKDVDEAYMNKVELESRLEGLTDEINFLRQLYEEEIRELQSQISDTSVVLSMDNSRSLDMDSIIAEVKAQYEDIANRSRAEAESMYQIKYEELQSLAGKHGDDLRRTKTEISEMNRNISRLQAEIEGLKGQRASLEAAIADAEQRGELAIKDANAKLSELEAALQRAKQDMARQLREYQELMNVKLALDIEIATYRKLLEGEESRLESGMQNMSIHTKTTSGYAGGLSSAYGGLTSPGLSYSLGSSFGSGAGSSSFSRTSSSRAVVVKKIETRDGKLVSESSDVLPK

SEQ ID NO: 103 - protein, 3122 aa, Homo sapiens
MPGAAGVLLLLLLSGGLGGVQAQRPQQQRQSQAHQQRGLFPAVLNLASNALITTNATCGEKGPEMYCKLVEHVPGQPVRNPQCRICNQNSSNPNQRHPITNAIDGKNTWWQSPSIKNGIEYHYVTITLDLQQVFQIAYVIVKAANSPRPGNWILERSLDDVEYKPWQYHAVTDTECLTLYNIYPRTGPPSYAKDDEVICTSFYSKIHPLENGEIHISLINGRPSADDPSPELLEFTSARYIRLRFQRIRTLNADLMMFAHKDPREIDPIVTRRYYYSVKDISVGGMCICYGHARACPLDPATNKSRCECEHNTCGDSCDQCCPGFHQKPWRAGTFLTKTECEACNCHGKAEECYYDENVARRNLSLNIRGKYIGGGVCINCTQNTAGINCETCTDGFFRPKGVSPNYPRPCQPCHCDPIGSLNEVCVKDEKHARRGLAPGSCHCKTGFGGVSCDRCARGYTGYPDCKACNCSGLGSKNEDPCFGPCICKENVEGGDCSRCKSGFFNLQEDNWKGCDECFCSGVSNRCQSSYWTYGKIQDMSGWYLTDLPGRIRVAPQQDDLDSPQQISISNAEARQALPHSYYWSAPAPYLGNKLPAVGGQLTFTISYDLEEEEEDTERVLQLMIILEGNDLSISTAQDEVYLHPSEEHTNVLLLKEESFTIHGTHFPVRRKEFMTVLANLKRVLLQITYSFGMDAIFRLSSVNLESAVSYPTDGSIAAAVEVCQCPPGYTGSSCESCWPRHRRVNGTIFGGICEPCQCFGHAESCDDVTGECLNCKDHTGGPYCDKCLPGFYGEPTKGTSEDCQPCACPLNIPSNNFSPTCHLDRSLGLICDGCPVGYTGPRCERCAEGYFGQPSVPGGSCQPCQCNDNLDFSIPGSCDSLSGSCLICKPGTTGRYCELCADGYFGDAVDAKNCQPCRCNAGGSFSEVCHSQTGQCECRANVQGQRCDKCKAGTFGLQSARGCVPCNCNSFGSKSFDCEESGQCWCQPGVTGKKCDRCAHGYFNFQEGGCTACECSHLGNNCDPKTGRCICPPNTIGEKCSKCAPNTWGHSITTGCKACNCSTVGSLDFQCNVNTGQCNCHPKFSGAKCTECSRGHWNYPRCNLCDCFLPGTDATTCDSETKKCSCSDQTGQCTCKVNVEGIHCDRCRPGKFGLDAKNPLGCSSCYCFGTTTQCSEAKGLIRTWVTLKAEQTILPLVDEALQHTTTKGIVFQHPEIVAHMDLMREDLHLEPFYWKLPEQFEGKKLMAYGGKLKYAIYFEAREETGFSTYNPQVIIRGGTPTHARIIVRHMAAPLIGQLTRHEIEMTEKEWKYYGDDPRVHRTVTREDFLDILYDIHYILIKATYGNFMRQSRISEISMEVAEQGRGTTMTPPADLIEKCDCPLGYSGLSCEACLPGFYRLRSQPGGRTPGPTLGTCVPCQCNGHSSLCDPETSICQNCQHHTAGDFCERCALGYYGIVKGLPNDCQQCACPLISSSNNFSPSCVAEGLDDYRCTACPRGYEGQYCERCAPGYTGSPGNPGGSCQECECDPYGSLPVPCDPVTGFCTCRPGATGRKCDGCKHWHAREGWECVFCGDECTGLLLGDLARLEQMVMSINLTGPLPAPYKMLYGLENMTQELKHLLSPQRAPERLIQLAEGNLNTLVTEMNELLTRATKVTADGEQTGQDAERTNTRAKSLGEFIKELARDAEAVNEKAIKLNETLGTRDEAFERNLEGLQKEIDQMIKELRRKNLETQKEIAEDELVAAEALLKKVKKLFGESRGENEEMEKDLREKLADYKNKVDDAWDLLREATDKIREANRLFAVNQKNMTALEKKKEAVESGKRQIENTLKEGNDILDEANRLADEINSIIDYVEDIQTKLPPMSEELNDKIDDLSQEIKDRKLAEKVSQAESHAAQLNDSSAVLDGILDEAKNISFNATAAFKAYSNIKDYIDEAEKVAKEAKDLAHEATKLATGPRGLLKEDAKGCLQKSFRILNEAKKLANDVKENEDHLNGLKTRIENADARNGDLLRTLNDTLGKLSAIPNDTAAKLQAVKDKARQANDTAKDVLAQITELHQNLDGLKKNYNKLADSVAKTNAVVKDPSKNKIIADADATVKNLEQEADRLIDKLKPIKELEDNLKKNISEIKELINQARKQANSIKVSVSSGGDCIRTYKPEIKKGSYNNIVVNVKTAVADNLLFYLGSAKFIDFLAIEMRKGKVSFLWDVGSGVGRVEYPDLTIDDSYWYRIVASRTGRNGTISVRALDGPKASIVPSTHHSTSPPGYTILDVDANAMLFVGGLTGKLKKADAVRVITFTGCMGETYFDNKPIGLWNFREKEGDCKGCTVSPQVEDSEGTIQFDGEGYALVSRPIRWYPNISTVMFKFRTFSSSALLMYLATRDLRDFMSVELTDGHIKVSYDLGSGMASVVSNQNHNDGKWKSFTLSRIQKQANISIVDIDTNQEENIATSSSGNNFGLDLKADDKIYFGGLPTLRNLSMKARPEVNLKKYSGCLKDIEISRTPYNILSSPDYVGVTKGCSLENVYTVSFPKPGFVELSPVPIDVGTEINLSFSTKNESGIILLGSGGTPAPPRRKRRQTGQAYYAILLNRGRLEVHLSTGARTMRKIVIRPEPNLFHDGREHSVHVERTRGIFTVQVDENRRYMQNLTVEQPIEVKKLFVGGAPPEFQPSPLRNIPPFEGCIWNLVINSVPMDFARPVSFKNADIGRCAHQKLREDEDGAAPAEIVIQPEPVPTPAFPTPTPVLTHGPCAAESEPALLIGSKQFGLSRNSHIAIAFDDTKVKNRLTIELEVRTEAESGLLFYMARINHADFATVQLRNGLPYFSYDLGSGDTHTMIPTKINDGQWHKIKIMRSKQEGILYVDGASNRTISPKKADILDVVGMLYVGGLPINYTTRRIGPVTYSIDGCVRNLHMAEAPADLEQPTSSFHVGTCFANAQRGTYFDGTGFAKAVGGFKVGLDLLVEFEFRTTTTTGVLLGISSQKMDGMGIEMIDEKLMFHVDNGAGRFTAVYDAGVPGHLCDGQWHKVTANKIKHRIELTVDGNQVEAQSPNPASTSADTNDPVFVGGFPDDLKQFGLTTSIPFRGCIRSLKLTKGTGKPLEVNFAKALELRGVQPVSCPAN

SEQ ID NO: 104 - protein, 250 aa, Homo sapiens [sequence omitted]

SEQ ID NO: 105 - protein, 586 aa, Homo sapiens
MATATPVPPRMGSRAGGPTTPLSPTRLSRLQEKEELRELNDRLAVYIDKVRSLETENSALQLQVTEREEVRGRELTGLKALYETELADARRALDDTARERAKLQIELGKCKAEHDQLLLNYAKKESDLNGAQIKLREYEAALNSKDAALATALGDKKSLEGDLEDLKDQIAQLEASLAAAKKQLADETLLKVDLENRCQSLTEDLEFRKSMYEEEINETRRKHETRLVEVDSGRQIEYEYKLAQALHEMREQHDAQVRLYKEELEQTYHAKLENARLSSEMNTSTVNSAREELMESRMRIESLSSQLSNLQKESRACLERIQELEDLLAKEKDNSRRMLTDKEREMAEIRDQMQQQLNDYEQLLDVKLALDMEISAYRKLLEGEEERLKLSPSPSSRVTVSRASSSRSVRTTRGKRKRVDVEESEASSSVSISHSASATGNVCIEEIDVDGKFIRLKNTSEQDQPMGGWEMIRKIGDTSVSYKYTSRYVLKAGQTVTIWAANAGVTASPPTDLIWKNQNSWGTGEDVKVILKNSQGEEVAQRSTVFKTTIPEEEEEEEEAAGVVVEEELFHQQGTPRASNRSCAIM

SEQ ID NO: 106 - protein, 268 aa, Homo sapiens
MAVNVYSTSVTSDNLSRHDMLAWINESLQLNLTKIEQLCSGAAYCQFMDMLFPGSIALKKVKFQAKLEHEYIQNFKILQAGFKRMGVDKIIPVDKLVKGKFQDNFEFVQWFKKFFDANYDGKDYDPVAARQGQETAVAPSLVAPALNKPKKPLTSSSAAPQRPISTQRTAAAPKAGPGVVRKNPGVGNGDDEAAELMQQVNVLKLTVEDLEKERDFYFGKLRNIELICQENEGENDPVLQRIVDILYATDEGFVIPDEGGPQEEQEEY

SEQ ID NO: 107 - protein, 863 aa, Homo sapiens
MSSPASTPSRRGSRRGRATPAQTPRSEDARSSPSQRRRGEDSTSTGELQPMPTSPGVDLQSPAAQDVLFSSPPQMHSSAIPLDFDVSSPLTYGTPSSRVEGTPRSGVRGTPVRQRPDLGSAQKGLQVDLQSDGAAAEDIVASEQSLGQKLVIWGTDVNVAACKENFQRFLQRFIDPLAKEEENVGIDITEPLYMQRLGEINVIGEPFLNVNCEHIKSFDKNLYRQLISYPQEVIPTFDMAVNEIFFDRYPDSILEHQIQVRPFNALKTKNMRNLNPEDIDQLITISGMVIRTSQLIPEMQEAFFQCQVCAHTTRVEMDRGRIAEPSVCGRCHTTHSMALIHNRSLFSDKQMIKLQESPEDMPAGQTPHTVILFAHNDLVDKVQPGDRVNVTGIYRAVPIRVNPRVSNVKSVYKTHIDVIHYRKTDAKRLHGLDEEAEQKLFSEKRVELLKELSRKPDIYERLASALAPSIYEHEDIKKGILLQLFGGTRKDFSHTGRGKFRAEINILLCGDPGTSKSQLLQYVYNLVPRGQYTSGKGSSAVGLTAYVMKDPETRQLVLQTGALVLSDNGICCIDEFDKMNESTRSVLHEVMEQQTLSIAKAGIICQLNARTSVLAAANPIESQWNPKKTTIENIQLPHTLLSRFDLIFLLLDPQDEAYDRRLAHHLVALYYQSEEQAEEELLDMAVLKDYIAYAHSTIMPRLSEEASQALIEAYVDMRKIGSSRGMVSAYPRQLESLIRLAEAHAKVRLSNKVEAIDVEEAKRLHREALKQSATDPRTGIVDISILTTGMSATSRKRKEELAEALKKLILSKGKTPALKYQQLFEDIRGQSDIAITKDMFEEALRALADDDFLTVTGKTVRLL

SEQ ID NO: 108 - protein, 115 aa, Homo sapiens
MPMFIVNTNVPRASVPDGFLSELTQQLAQATGKPPQYIAVHVVPDQLMAFGGSSEPCALCSLHSIGKIGGAQNRSYSKLLCGLLAERLRISPDRVYINYYDMNAANVGWNNSTFA

SEQ ID NO: 109 - protein, 267 aa, Homo sapiens
MRLTVLCAVCLLPGSLALPLPQEAGGMSELQWEQAQDYLKRFYLYDSETKNANSLEAKLKEMQKFFGLPITGMLNSRVIEIMQKPRCGVPDVAEYSLFPNSPKWTSKVVTYRIVSYTRDLPHITVDRLVSKALNMWGKEIPLHFRKVVWGTADIMIGFARGAHGDSYPFDGPGNTLAHAFAPGTGLGGDAHFDEDERWTDGSSLGINFLYAATHELGHSLGMGHSSDPNAVMYPTYGNGDPQNFKLSQDDIKGIQKLYGKRSNSRKK

SEQ ID NO: 110 - protein, 707 aa, Homo sapiens
MSLWQPLVLVLLVLGCCFAAPRQRQSTLVLFPGDLRTNLTDRQLAEEYLYRYGYTRVAEMRGESKSLGPALLLLQKQLSLPETGELDSATLKAMRTPRCGVPDLGRFQTFEGDLKWHHHNITYWIQNYSEDLPRAVIDDAFARAFALWSAVTPLTFTRVYSRDADIVIQFGVAEHGDGYPFDGKDGLLAHAFPPGPGIQGDAHFDDDELWSLGKGVVVPTRFGNADGAACHFPFIFEGRSYSACTTDGRSDGLPWCSTTANYDTDDRFGFCPSERLYTQDGNADGKPCQFPFIFQGQSYSACTTDGRSDGYRWCATTANYDRDKLFGFCPTRADSTVMGGNSAGELCVFPFTFLGKEYSTCTSEGRGDGRLWCATTSNFDSDKKWGFCPDQGYSLFLVAAHEFGHALGLDHSSVPEALMYPMYRFTEGPPLHKDDVNGIRHLYGPRPEPEPRPPTTTTPQPTAPPTVCPTGPPTVHPSERPTAGPTGPPSAGPTGPPTAGPSTATTVPLSPVDDACNVNIFDAIAEIGNQLYLFKDGKYWRFSEGRGSRPQGPFLIADKWPALPRKLDSVFEERLSKKLFFFSGRQVWVYTGASVLGPRRLDKLGLGADVAQVTGALRSGRGKMLLFSGRRLWRFDVKAQMVDPRSASEVDRMFPGVPLDTHDVFQYREKAYFCQDRFYWRVSSRSELNQVDQVGYVTYDILQCPED

SEQ ID NO: 111 - protein, 297 aa, Homo sapiens
MTTPRNSVNGTFPAEPMKGPIAMQSGPKPLFRRMSSLVGPTQSFFMRESKTLGAVQIMNGLFHIALGGLLMIPAGIYAPICVTVWYPLWGGIMYIISGSLLAATEKNSRKCLVKGKMIMNSLSLFAAISGMILSIMDILNIKISHFLKMESLNFIRAHTPYINIYNCEPANPSEKNSPSTQYCYSIQSLFLGILSVMLIFAFFQELVIAGIVENEWKRTCSRPKSNIVLLSAEEKKEQTIEIKEEVVGLTETSSQPKNEEDIEIIPIQEEEEEETETNFPEPPQDQESSPIENDSSP

SEQ ID NO: 112 - protein, 151 aa, Homo sapiens
MCDFTEDQTAEFKEAFQLFDRTGDGKILYSQCGDVMRALGQNPTNAEVLKVLGNPKSDEMNVKVLDFEHFLPMLQTVAKNKDQGTYEDYVEGLRVFDKEGNGTVMGAEIRHVLVTLGEKMTEEEVEMLVAGHEDSNGCINYEAFVRHILSG

SEQ ID NO: 113 - protein, 172 aa, Homo sapiens
MSSKRAKAKTTKKRPQRATSNVFAMFDQSQIQEFKEAFNMIDQNRDGFIDKEDLHDMLASLGKNPTDEYLEGMMSEAPGPINFTMFLTMFGEKLNGTDPEDVIRNAFACFDEEASGFIHEDHLRELLTTMGDRFTDEEVDEMYREAPIDKKGNFNYVEFTRILKHGAKDKDD

SEQ ID NO: 114 - protein, 152 aa, Homo sapiens
MANCERTFIAIKPDGVQRGLVGEIIKRFEQKGFRLVGLKFMQASEDLLKEHYVDLKDRPFFAGLVKYMHSGPVVAMVWEGLNVVKTGRVMLGETNPADSKPGTIRGDFCIQVGRNIIHGSDSVESAEKEIGLWFHPEELVDYTSCAQNWIYE

SEQ ID NO: 115 - protein, 264 aa, Homo sapiens
MESGFTSKDTYLSHFNPRDYLEKYYKFGSRHSAESQILKHLLKNLFKIFCLDGVKGDLLIDIGSGPTIYQLLSACESFKEIVVTDYSDQNLQELEKWLKKEPEAFDWSPVVTYVCDLEGNRVKGPEKEEKLRQAVKQVLKCDVTQSQPLGAVPLPPADCVLSTLCLDAACPDLPTYCRALRNLGSLLKPGGFLVIMDALKSSYYMIGEQKFSSLPLGREAVEAAVKEAGYTIEWFEVISQSYSSTMANNEGLFSLVARKLSRPL

SEQ ID NO: 116 - protein, 201 aa, Homo sapiens
MALSWVLTVLSLLPLLEAQIPLCANLVPVPITNATLDQITGKWFYIASAFRNEEYNKSVQEIQATFFYFTPNKTEDTIFLREYQTRQDQCIYNTTYLNVQRENGTISRYVGGQEHFAHLLILRDTKTYMLAFDVNDEKNWGLSVYADKPETTKEQLGEFYEALDCLRIPKSDVVYTDWKKDKCEPLEKQHEKERKQEEGES

SEQ ID NO: 117 - protein, 640 aa, Homo sapiens
MAALYRPGLRLNWHGLSPLGWPSCRSIQTLRVLSGDLGQLPTGIRDFVEHSARLCQPEGIHICDGTEAENTATLTLLEQQGLIRKLPKYNNCWLARTDPKDVARVESKTVIVTPSQRDTVQLPPGGARGQLGNWMSPADFQRAVDERFPGCMQGRTMYVLPFSMGPVGSPLSRIGVQLTDSAYVVASMRIMTRLGTPVLQALGDGDFVKCLHSVGQPLTGQGEPVSQWPCNPEKTLIGHVPDQREIISFGSGYGGNSLLGKKCFALRIASRLARDEGWLAEHMLILGITSPAGKKRYVAAAFPSACGKTNLAMMRPALPGWKVECVGDDIAWMRFDSEGRLRAINPENGFFGVAPGTSATTNPNAMATIQSNTIFTNVAETSDGGVYWEGIDQPLPPGVTVTSWLGKPWKPGDKEPCAHPNSRFCAPARQCPIMDPAWEAPEGVPIDAIIFGGRRPKGVPLVYEAFNWRHGVFVGSAMRSESTAAAEHKGKIIMHDPFAMRPFFGYNFGHYLEHWLSMEGRKGAQLPRIFHVNWFRRDEAGHFLWPGFGENARVLDWICRRLEGEDSARETPIGLVPKEGALDLSGLRAIDTTQLFSLPKDFWEQEVRDIRSYLTEQVNQDLPKEVLAELEALERRVHKM

SEQ ID NO: 118 - protein, 505 aa, Homo sapiens
MRLRRLALFPGVALLLAAARLAAASDVLELTDDNFESRISDTGSAGLMLVEFFAPWCGHCKRLAPEYEAAATRLKGIVPLAKVDCTANTNTCNKYGVSGYPTLKIFRDGEEAGAYDGPRTADGIVSHLKKQAGPASVPLRTEEEFKKFISDKDASIVGFFDDSFSEAHSEFLKAASNLRDNYRFAHTNVESLVNEYDDNGEGIILFRPSHLTNKFEDKTVAYTEQKMTSGKIKKFIQENIFGICPHMTEDNKDLIQGKDLLIAYYDVDYEKNAKGSNYWRNRVMMVAKKFLDAGHKLNFAVASRKTFSHELSDFGLESTAGEIPVVAIRTAKGEKFVMQEEFSRDGKALERFLQDYFDGNLKRYLKSEPIPESNDGPVKVVVAENFDEIVNNENKDVLIEFYAPWCGHCKNLEPKYKELGEKLSKDPNIVIAKMDATANDVPSPYEVRGFPTIYFSPANKKLNPKKYEGGRELSDFISYLQREATNPPVIQEEKPKKKKKAQEDL

SEQ ID NO: 119 - protein, 440 aa, Homo sapiens
MALLVLGLVSCTFFLAVNGLYSSSDDVIELTPSNFNREVIQSDSLWLVEFYAPWCGHCQRLTPEWKKAATALKDVVKVGAVDADKHHSLGGQYGVQGFPTIKIFGSNKNRPEDYQGGRTGEAIVDAALSALRQLVKDRLGGRSGGYSSGKQGRSDSSSKKDVIELTDDSFDKNVLDSEDVWMVEFYAPWCGHCKNLEPEWAAAASEVKEQTKGKVKLAAVDATVNQVLASRYGIRGFPTIKIFQKGESPVDYDGGRTRSDIVSRALDLFSDNAPPPELLEIINEDIAKRTCEEHQLCVVAVLPHILDTGAAGRNSYLEVLLKLADKYKKKMWGWLWTEAGAQSELETALGIGGFGYPAMAAINARKMKFALLKGSFSEQGINEFLRELSFGRGSTAPVGGGAFPTIVEREPWDGRDGELPVEDDIDLSDVELDDLGKDEL

SEQ ID NO: 120 - protein, 312 aa, Homo sapiens
MEEECRVLSIQSHVIRGYVGNRAATFPLQVLGFEIDAVNSVQFSNHTGYAHWKGQVLNSDELQELYEGLRLNNMNKYDYVLTGYTRDKSFLAMVVDIVQELKQQNPRLVYVCDPVLGDKWDGEGSMYVPEDLLPVYKEKVVPLADIITPNQFEAELLSGRKIHSQEEALRVMDMLHSMGPDTVVITSSDLPSPQGSNYLIVLGSQRRRNPAGSVVMERIRMDIRKVDAVFVGTGDLFAAMLLAWTHKHPNNLKVACEKTVSTLHHVLQRTIQCAKAQAGEGVRPSPMQLELRMVQSKRDIEDPEIVVQATVL

SEQ ID NO: 121 - protein, 187 aa, Homo sapiens
MPVDLSKWSGPLSLQEVDEQPQHPLHVTYAGAAVDELGKVLTPTQVKNRPTSISWDGLDSGKLYTLVLTDPDAPSRKDPKYREWHHFLVVNMKGNDISSGTVLSDYVGSGPPKGTGLHRYVWLVYEQDRPLKCDEPILSNRSGDHRGKFKVASFRKKYELRAPVAGTCYQAEWDDYVPKLYEQLSGK

SEQ ID NO: 122 - protein, 270 aa, Homo sapiens
MVLLKEYRVILPVSVDEYQVGQLYSVAEASKNETGGGEGVEVLVNEPYEKDGEKGQYTHKIYHLQSKVPTFVRMLAPEGALNIHEKAWNAYPYCRTVITNEYMKEDFLIKIETWHKPDLGTQENVHKLEPEAWKHVEAVYIDIADRSQVLSKDYKAEEDPAKFKSIKTGRGPLGPNWKQELVNQKDCPYMCAYKLVTVKFKWWGLQNKVENFIHKQERRLFTNFHRQLFCWLDKWVDLTMDDIRRMEEETKRQLDEMRQKDPVKGMTADD

SEQ ID NO: 123 - protein, 531 aa, Homo sapiens
MSKPHSEAGTAFIQTQQLHAAMADTFLEHMCRLDIDSPPITARNTGIICTIGPASRSVETLKEMIKSGMNVARLNFSHGTHEYHAETIKNVRTATESFASDPILYRPVAVALDTKGPEIRTGLIKGSGTAEVELKKGATLKITLDNAYMEKCDENILWLDYKNICKVVEVGSKIYVDDGLISLQVKQKGADFLVTEVENGGSLGSKKGVNLPGAAVDLPAVSEKDIQDLKFGVEQDVDMVFASFIRKASDVHEVRKVLGEKGKNIKIISKIENHEGVRRFDEILEASDGIMVARGDLGIEIPAEKVFLAQKMMIGRCNRAGKPVICATQMLESMIKKPRPTRAEGSDVANAVLDGADCIMLSGETAKGDYPLEAVRMQHLIAREAEAAIYHLQLFEELRRLAPITSDPTEATAVGAVEASFKCCSGAIIVLTKSGRSAHQVARYRPRAPIIAVTRNPQTARQAHLYRGIFPVLCKDPVQEAWAEDVDLRVNFAMNVGKARGFFKKGDVVIVLTGWRPGSGFTNTMRVVPVP

SEQ ID NO: 124 - protein, 431 aa, Homo sapiens
MRALLARLLLCVLVVSDSKGSNELHQVPSNCDCLNGGTCVSNKYFSNIHWCNCPKKFGGQHCEIDKSKTCYEGNGHFYRGKASTDTMGRPCLPWNSATVLQQTYHAHRSDALQLGLGKHNYCRNPDNRRRPWCYVQVGLKPLVQECMVHDCADGKKPSSPPEELKFQCGQKTLRPRFKIIGGEFTTIENQPWFAAIYRRHRGGSVTYVCGGSLISPCWVISATHCFIDYPKKEDYIVYLGRSRLNSNTQGEMKFEVENLILHKDYSADTLAHHNDIALLKIRSKEGRCAQPSRTIQTICLPSMYNDPQFGTSCEITGFGKENSTDYLYPEQLKMTVVKLISHRECQQPHYYGSEVTTKMLCAADPQWKTDSCQGDSGGPLVCSLQGRMTLTGIVSWGRGCALKDKPGVYTRVSHFLPWIRSHTKEENGLAL

SEQ ID NO: 125 - protein, 289 aa, Homo sapiens
MSGFSTEERAAPFSLEYRVFLKNEKGQYISPFHDIPIYADKDVFHMVVEVPRWSNAKMEIATKDPLNPIKQDVKKGKLRYVANLFPYKGYIWNYGAIPQTWEDPGHNDKHTGCCGDNDPIDVCEIGSKVCARGEIIGVKVLGILAMIDEGETDWKVIAINVDDPDAANYNDINDVKRLKPGYLEATVDWFRRYKVPDGKPENEFAFNAEFKDKDFAIDIIKSTHDHWKALVTKKTNGKGISCMNTTLSESPFKCDPDAARAIVDALPPPCESACTVPTDVDKWFHHQKN

SEQ ID NO: 126 - protein, 199 aa, Homo sapiens
MSSGNAKIGHPAPNFKATAVMPDGQFKDISLSDYKGKYVVFFFYPLDFTFVCPTEIIAFSDRAEEFKKLNCQVIGASVDSHFCHLAWVNTPKKQGGLGPMNIPLVSDPKRTIAQDYGVLKADEGISFRGLFIIDDKGILRQITVNDLPVGRSVDETLRLVQAFQFTDKHGEVCPAGWKPGSDTIKPDVQKSKEYFSKQK

SEQ ID NO: 127 - protein, 912 aa, Homo sapiens
MSAPPVLRPPSPLLPVAAAAAAAAAALVPGSGPGPAPFLAPVAAPVGGISFHLQIGLSREPVLLLQDSSGDYSLAHVREMACSIVDQKFPECGFYGMYDKILLFRHDPTSENILQLVKAASDIQEGDLIEVVLSASATFEDFQIRPHALFVHSYRAPAFCDHCGEMLWGLVRQGLKCEGCGLNYHKRCAFKIPNNCSGVRRRRLSNVSLTGVSTIRTSSAELSTSAPDEPLLQKSPSESFIGREKRSNSQSYIGRPIHLDKILMSKVKVPHTFVIHSYTRPTVCQYCKKLLKGLFRQGLQCKDCRFNCHKRCAPKVPNNCLGEVTINGDLLSPGAESDVVMEEGSDDNDSERNSGLMDDMEEAMVQDAEMAMAECQNDSGEMQDPDPDHEDANRTISPSTSNNIPLMRVVQSVKHTKRKSSTVMKEGWMVHYTSKDTLRKRHYWRLDSKCITLFQNDTGSRYYKEIPLSEILSLEPVKTSALIPNGANPHCFEITTANVVYYVGENVVNPSSPSPNNSVLTSGVGADVARMWEIAIQHALMPVIPKGSSVGTGTNLHRDISVSISVSNCQIQENVDISTVYQIFPDEVLGSGQFGIVYGGKHRKTGRDVAIKIIDKLRFPTKQESQLRNEVAILQNLHHPGVVNLECMFETPERVFVVMEKLHGDMLEMILSSEKGRLPEHITKFLITQILVALRHLHFKNIVHCDLKPENVLLASADPFPQVKLCDFGFARIIGEKSFRRSVVGTPAYLAPEVLRNKGYNRSLDMWSVGVIIYVSLSGTFPFNEDEDIHDQIQNAAFMYPPNPWKEISHEAIDLINNLLQVKMRKRYSVDKTLSHPWLQDYQTWLDLRELECKIGERYITHESDDLRWEKYAGEQGLQYPTHLINPSASHSDTPETEETEMKALGERVSIL

SEQ ID NO: 128 - protein, 227 aa, Homo sapiens
MNIKGSPWKGSLLLLLVSNLLLCQSVAPLPICPGGAARCQVTLRDLFDRAVVLSHYIHNLSSEMFSEFDKRYTHGRGFITKAINSCHTSSLATPEDKEQAQQMNQKDFLSLIVSILRSWNEPLYHLVTEVRGMQEAPEAILSKAVEIEEQTKRLLEGMELIVSQVHPETKENEIYPVWSGLPSLQMADEESRLSAYYNLLHCLRRDSHKIDNYLKLLKCRIIHNNNC

SEQ ID NO: 129 - protein, 226 aa, Homo sapiens
MFTLLVLLSQLPTVTLGFPHCARGPKASKHAGEEVFTSKEEANFFIHRRLLYNRFDLELFTPGNLERECNEELCNYEEAREIFVDEDKTIAFWQEYSAKGPTTKSDGNREKIDVMGLLTGLIAAGVFLVIFGLLGYYLCITKCNRLQHPCSSAVYERGRHTPSIIFRRPEEAALSPLPPSVEDAGLPSYEQAVALTRKHSVSPPPPYPGHTKGFRVFKKSMSLPSH

SEQ ID NO: 130 - protein, 254 aa, Homo sapiens
MASLLKVDQEVKLKVDSFRERITSEAEDLVANFFPKKLLELDSFLKEPILNIHDLTQIHSDMNLPVPDPILLTNSHDGLDGPTYKKRRLDECEEAFQGTKVFVMPNGMLKSNQQLVDIIEKVKPEIRLLIEKCNTVKMWVQLLIPRIEDGNNFGVSIQEETVAELRTVESEAASYLDQISRYYITRAKLVSKIAKYPHVEDYRRTVTEIDEKEYISLRLIISELRNQYVTLHDMILKNIEKIKRPRSSNAETLY

SEQ ID NO: 131 - protein, 403 aa, Homo sapiens [sequence omitted]

SEQ ID NO: 132 - protein, 1052 aa, Homo sapiens
MAAAYLDPNLNHTPNSSTKTHLGTGMERSPGAMERVLKVFHYFESNSEPTTWASIIRHGDATDVRGIIQKIVDSHKVKHVACYGFRLSHLRSEEVHWLHVDMGVSSVREKYELAHPPEEWKYELRIRYLPKGFLNQFTEDKPTLNFFYQQVKSDYMLEIADQVDQEIALKLGCLEIRRSYWEMRGNALEKKSNYEVLEKDVGLKRFFPKSLLDSVKAKTLRKLIQQTFRQFANLNREESILKFFEILSPVYRFDKECFKCALGSSWIISVELAIGPEEGISYLTDKGCNPTHLADFTQVQTIQYSNSEDKDRKGMLQLKIAGAPEPLTVTAPSLTIAENMADLIDGYCRLVNGTSQSFIIRPQKEGERALPSIPKLANSEKQGMRTHAVSVSETDDYAEIIDEEDTYTMPSTRDYEIQRERIELGRCIGEGQFGDVHQGIYMSPENPALAVAIKTCKNCTSDSVREKFLQEALTMRQFDHPHIVKLIGVITENPVWIIMELCTLGELRSFLQVRKYSLDLASLILYAYQLSTALAYLESKRFVHRDIAARNVLVSSNDCVKLGDFGLSRYMEDSTYYKASKGKLPIKWMAPESINFRRFTSASDVWMFGVCMWEILMHGVKPFQGVKNNDVIGRIENGERLPMPPNCPPTLYSLMTKCWAYDPSRRPRFTELKAQLSTILEEEKAQQEERMRMESRRQATVSWDSGGSDEAPPKPSRPGYPSPRSSEGFYPSPQHMVQTNHYQVSGYPGSHGITAMAGSIYPGQASLLDQTDSWNHRPQEIAMWQPNVEDSTVLDLRGIGQVLPTHLMEERLIRQQQEMEEDQRWLEKEERFLKPDVRLSRGSIDREDGSLQGPIGNQHIYQPVGKPDPAAPPKKPPRPGAPGHLGSLASLSSPADSYNEGVKLQPQEISPPPTANLDRSNDKVYENVTGLVKAVIEMSSKIQPAPPEEYVPMVKEVGLALRTLLATVDETIPLLPASTHREIEMAQKLLNSDLGELINKMKLAQQYVMTSLQQEYKKQMLTAAHALAVDAKNLLDVIDQARLKMLGQTRPH

SEQ ID NO: 133 - protein, 1009 aa, Homo sapiens
MSGVSEPLSRVKLGTLRRPEGPAEPMVVVPVDVEKEDVRILKVCFYSNSFNPGKNFKLVKCTVQTEIREIITSILLSGRIGPNIRLAECYGLRLKHMKSDEIHWLHPQMTVGEVQDKYECLHVEAEWRYDLQIRYLPEDFMESLKEDRTTLLYFYQQLRNDYMQRYASKVSEGMALQLGCLELRRFFKDMPHNALDKKSNFELLEKEVGLDLFFPKQMQENLKPKQFRKMIQQTFQQYASLREEECVMKFFNTLAGFANIDQETYRCELIQGWNITVDLVIGPKGIRQLTSQDAKPTCLAEFKQIRSIRCLPLEEGQAVLQLGIEGAPQALSIKTSSLAEAENMADLIDGYCRLQGEHQGSLIIHPRKDGEKRNSLPQIPMLNLEARRSHLSESCSIESDIYAEIPDETLRRPGGPQYGIAREDVVLNRILGEGFFGEVYEGVYTNHKGEKINVAVKTCKKDCTLDNKEKFMSEAVIMKNLDHPHIVKLIGIIEEEPTWIIMELYPYGELGHYLERNKNSLKVLTLVLYSLQICKAMAYLESINCVHRDIAVRNILVASPECVKLGDFGLSRYIEDEDYYKASVTRLPIKWMSPESINFRRFTTASDVWMFAVCMWEILSFGKQPFFWLENKDVIGVLEKGDRLPKPDLCPPVLYTLMTRCWDYDPSDRPRFTELVCSLSDVYQMEKDIAMEQERNARYRTPKILEPTAFQEPPPKPSRPKYRPPPQTNLLAPKLQFQVPEGLCASSPTLTSPMEYPSPVNSLHTPPLHRHNVFKRHSMREEDFIQPSSREEAQQLWEAEKVKMRQILDKQQKQMVEDYQWLRQEEKSLDPMVYMNDKSPLTPEKEVGYLEFTGPPQKPPRLGAQSIQPTANLDRTDDLVYLNVMELVRAVLELKNELCQLPPEGYVVVVKNVGLTLRKLIGSVDDLLPSLPSSSRTEIEGTQKLLNKDLAELINKMRLAQQNAVTSLSEECKRQMLTASHTLAVDAKNLLDAVDQAKVLANLAHPPAE

SEQ ID NO: 134 - protein, 108 aa, Homo sapiens [sequence omitted]

SEQ ID NO: 135 - protein, 158 aa, Homo sapiens
MASRSMRLLLLLSCLAKTGVLGDIIMRPSCAPGWFYHKSNCYGYFRKLRNWSDAELECQSYGNGAHLASILSLKEASTIAEYISGYQRSQPIWIGLHDPQKRQQWQWIDGAMYLYRSWSGKSMGGNKHCAEMSSNNNFLTWSSNECNKRQHFLCKYRP

SEQ ID NO: 136 - protein, 193 aa, Homo sapiens
MAAIRKKLVIVGDGACGKTCLLIVFSKDQFPEVYVPTVFENYVADIEVDGKQVELALWDTAGQEDYDRLRPLSYPDTDVILMCFSIDSPDSLENIPEKWTPEVKHFCPNVPIILVGNKKDLRNDEHTRRELAKMKQEPVKPEEGRDMANRIGAFGYMECSAKTKDGVREVFEMATRAALQARRGKKKSGCLVL

SEQ ID NO: 137 - protein, 196 aa, Homo sapiens
MAAIRKKLVVVGDGACGKTCLLIVFSKDEFPEVYVPTVFENYVADIEVDGKQVELALWDTAGQEDYDRLRPLSYPDTDVILMCFSVDSPDSLENIPEKWVPEVKHFCPNVPIILVANKKDLRSDEHVRTELARMKQEPVRTDDGRAMAVRIQAYDYLECSAKTKEGVREVFETATRAALQKRYGSQNGCINCCKVL

SEQ ID NO: 138 - protein, 193 aa, Homo sapiens
MAAIRKKLVIVGDGACGKTCLLIVFSKDQFPEVYVPTVFENYIADIEVDGKQVELALWDTAGQEDYDRLRPLSYPDTDVILMCFSIDSPDSLENIPEKWTPEVKHFCPNVPIILVGNKKDLRQDEHTRRELAKMKQEPVRSEEGRDMANRISAFGYLECSAKTKEGVREVFEMATRAGLQVRKNKRRRGCPIL

SEQ ID NO: 139 - protein, 295 aa, Homo sapiens [sequence omitted]

SEQ ID NO: 140 - protein, 1410 aa, Homo sapiens
MDIYDTQTLGVVVFGGFMVVSAIGIFLVSTFSMKETSYEEALANQRKEMAKTHHQKVEKKKKEKTVEKKGKTKKKEEKPNGKIPDHDPAPNVTVLLREPVRAPAVAVAPTPVQPPIIVAPVATVPAMPQEKLASSPKDKKKKEKKVAKVEPAVSSVVNSIQVLTSKAAILETAPKEVPMVVVPPVGAKGNTPATGTTQGKKAEGTQNQSKKAEGAPNQGRKAEGTPNQGKKTEGTPNQGKKAEGTPNQGKKAEGTPNQGKKAEGAQNQGKKVDTTPNQGKKVEGAPTQGRKAEGAQNQAKKVEGAQNQGKKAEGAQNQGKKGEGAQNQGKKAEGAQNQGKKAEGAQNQGKKAEGAQNQGKKAEGAQNQGKKAEGAQNQGKKSEGAQNQGKKVEGAQNQGKKAEGAQNQGKKAEGAQNQGKKAEGAQNQGKKAEGAQNQGKKAEGAQNQGKKAEGAQNQGKKAEGAQNQGKKVEGAQNQGKKAEGAQNQGKKAEGAQNQGKKAEGAQNQGQKGEGAQNQGKKTEGAQGKKAERSPNQGKKGEGAPIQGKKADSVANQGTKVEGITNQGKKAEGSPSEGKKAEGSPNQGKKADAAANQGKKTESASVQGRNTDVAQSPEAPKQEAPAKKKSGSKKKGEPGPPDADGPLYLPYKTLVSTVGSMVFNEGEAQRLIEILSEKAGIIQDTWHKATQKGDPVAILKRQLEEKEKLLATEQEDAAVAKSKLRELNKEMAAEKAKAAAGEAKVKKQLVAREQEITAVQARMQASYREHVKEVQQLQGKIRTLQEQLENGPNTQLARLQQENSILRDALNQATSQVESKQNAELAKLRQELSKVSKELVEKSEAVRQDEQQRKALEAKAAAFEKQVLQLQASHRESEEALQKRLDEVSRELCHTQSSHASLRADAEKAQEQQQQMAELHSKLQSSEAEVRSKCEELSGLHGQLQEARAENSQLTERIRSIEALLEAGQARDAQDVQASQAEADQQQTRLKELESQVSGLEKEAIELREAVEQQKVKNNDLREKNWKAMEALATAEQACKEKLLSLTQAKEESEKQLCLIEAQTMEALLALLPELSVLAQQNYTEWLQDLKEKGPTLLKHPPAPAEPSSDLASKLREAEETQSTLQAECDQYRSILAETEGMLRDLQKSVEEEEQVWRAKVGAAEEELQKSRVTVKHLEEIVEKLKGELESSDQVREHTSHLEAELEKHMAAASAECQNYAKEVAGLRQLLLESQSQLDAAKSEAQKQSDELALVRQQLSEMKSHVEDGDIAGAPASSPEAPPAEQDPVQLKTQLEWTEAILEDEQTQRQKLTAEFEEAQTSACRLQEELEKLRTAGPLESSETEEASQLKERLEKEKKLTSDLGRAATRLQELLKTTQEQLAREKDTVKKLQEQLEKAEDGSSSKEGTSV

SEQ ID NO: 141 - protein, 105 aa, Homo sapiens
MAKISSPTETERCIESLIAVFQKYAGKDGYNYTLSKTEFLSFMNTELAAFTKNQKDPGVLDRMMKKLDTNSDGQLDFSEFLNLIGGLAMACHDSFLKAVPSQKRT

SEQ ID NO: 142 - protein, 92 aa, Homo sapiens
MTKLEEHLEGIVNIFHQYSVRKGHFDTLSKGELKQLLTKELANTIKNIKDKAVIDEIFQGLDANQDEQVDFQEFISLVAIALKAAHYHTHKE

SEQ ID NO: 143 - protein, 93 aa, Homo sapiens
MLTELEKALNSIIDVYHKYSLIKGNFHAVYRDDLKKLLETECPQYIRKKGADVWFKELDINTDGAVNFQEFLILVIKMGVAAHKKSHEESHKE

SEQ ID NO: 144 - protein, 114 aa, Homo sapiens
MTCKMSQLERNIETIINTFHQYSVKLGHPDTLNQGEFKELVRKDLQNFLKKENKNEKVIEHIMEDLDTNADKQLSFEEFIMLMARLTWASHEKMHEGDEGPGHHHKPGLGEGTP

SEQ ID NO: 145 - protein, 122 aa, Homo sapiens
MKLLTGLVFCSLVLGVSSRSFFSFLGEAFDGARDMWRAYSDMREANYIGSDKYFHARGNYDAAKRGPGGVWAAEAISDARENIQRFFGHGAEDSLADQAANEWGRSGKDPNHFRPAGLPEKY

SEQ ID NO: 146 - protein, 122 aa, Homo sapiens
MKLLTGLVFCSLVLSVSSRSFFSFLGEAFDGARDMWRAYSDMREANYIGSDKYFHARGNYDAAKRGPGGAWAAEVISNARENIQRLTGRGAEDSLADQAANKWGRSGRDPNHFRPAGLPEKY

SEQ ID NO: 147 - protein, 276 aa, Homo sapiens
MDSSREPTLGRLDAAGFWQVWQRFDADEKGYIEEKELDAFFLHMLMKLGTDDTVMKANLHKVKQQFMTTQDASKDGRIRMKELAGMFLSEDENFLLLFRRENPLDSSVEFMQIWRKYDADSSGFISAAELRNFLRDLFLHHKKAISEAKLEEYTGTMMKIFDRNKDGRLDLNDLARILALQENFLLQFKMDACSTEERKRDFEKIFAYYDVSKTGALEGPEVDGFVKDMMELVQPSISGVDLDKFREILLRHCDVNKDGKIQKSELALCLGLKINP

SEQ ID NO: 148 - protein, 435 aa, Homo sapiens
MSGYQRRPGATPLSRARSLAIPDAPAFYERRSCLPQLNCERPHGRDLDSPFFGIRPAFMCYVPSPVLASVGDTDFGYGKGKCSKQSPSGAHGTHFGDDRFEDLEEANPFSFREFLKTKNLGLSKEDPASRIYAKEASRHSLGLDHNSPPSQTGGYGLEYQQPFFEDPTGAGDLLDEEEDEDTGWSGAYLPSAIEQTHPERVPAGTSPCSTYLSFFSTPSELAGPESLPSWALSDTDSRVSPASPAGSPSADFAVHGESLGDRHLRTLQISYDALKDENSKLRRKLNEVQSFSEAQTEMVRTLERKLEAKMIKEESDYHDLESVVQQVEQNLELMTKRAVKAENHVVKLKQEISLLQAQVSNFQRENEALRCGQGASLTVVKQNADVALQNLRVVMNSAQASIKQLVSGAETLNLVAEILKSIDRISEVKDEEEDS

SEQ ID NO: 149 - protein, 664 aa, Homo sapiens
MSGVRGLSRLLSARRLALAKAWPTVLQTGTRGFHFTVDGNKRASAKVSDSISAQYPVVDHEFDAVVVGAGGAGLRAAFGLSEAGFNTACVTKLFPTRSHTVAAQGGINAALGNMEEDNWRWHFYDTVKGSDWLGDQDAIHYMTEQAPAAVVELENYGMPFSRTEDGKIYQRAFGGQSLKFGKGGQAHRCCCVADRTGHSLLHTLYGRSLRYDTSYFVEYFALDLLMENGECRGVIALCIEDGSIHRIRAKNTVVATGGYGRTYFSCTSAHTSTGDGTAMITRAGLPCQDLEFVQFHPTGIYGAGCLITEGCRGEGGILINSQGERFMERYAPVAKDLASRDVVSRSMTLEIREGRGCGPEKDHVYLQLHHLPPEQLATRLPGISETAMIFAGVDVTKEPIPVLPTVHYNMGGIPTNYKGQVLRHVNGQDQIVPGLYACGEAACASVHGANRLGANSLLDLVVFGRACALSIEESCRPGDKVPPIKPNAGEESVMNLDKLRFADGSIRTSELRLSMQKSMQNHAAVFRVGSVLQEGCGKISKLYGDLKHLKTFDRGMVWNTDLVETLELQNLMLCALQTIYGAEARKESRGAHAREDYKVRIDEYDYSKPIQGQQKKPFEEHWRKHTLSYVDVGTGKVTLEYRPVIDKTLNEADCATVPPAIRSY

SEQ ID NO: 150 - protein, 472 aa, Homo sapiens
MATKCGNCGPGYSTPLEAMKGPREEIVYLPCIYRNTGTEAPDYLATVDVDPKSPQYCQVIHRLPMPNLKDELHHSGWNTCSSCFGDSTKSRTKLVLPSLISSRIYVVDVGSEPRAPKLHKVIEPKDIHAKCELAFLHTSHCLASGEVMISSLGDVKGNGKGGFVLLDGETFEVKGTWERPGGAAPLGYDFWYQPRHNVMISTEWAAPNVLRDGFNPADVEAGLYGSHLYVWDWQRHEIVQTLSLKDGLIPLEIRFLHNPDAAQGFVGCALSSTIQRFYKNEGGTWSVEKVIQVPPKKVKGWLLPEMPGLITDILLSLDDRFLYFSNWLHGDLRQYDISDPQRPRLTGQLFLGGSIVKGGPVQVLEDEELKSQPEPLVVKGKRVAGGPQMIQLSLDGKRLYITTSLYSAWDKQFYPDLIREGSVMLQVDVDTVKGGLKLNPNFLVDFGKEPLGPALAHELRYPGGDCSSDIWI

SEQ ID NO: 151 - protein, 412 aa, Homo sapiens
MPLQLLLLLILLGPGNSLQLWDTWADEAEKALGPLLARDRRQATEYEYLDYDFLPETEPPEMLRNSTDTTPLTGPGTPESTTVEPAARRSTGLDAGGAVTELTTELANMGNLSTDSAAMEIQTTQPAATEAQTTQPVPTEAQTTPLAATEAQTTRLTATEAQTTPLAATEAQTTPPAATEAQTTQPTGLEAQTTAPAAMEAQTTAPAAMEAQTTPPAAMEAQTTQTTAMEAQTTAPEATEAQTTQPTATEAQTTPLAAMEALSTEPSATEALSMEPTTKRGLFIPFSVSSVTHKGIPMAASNLSVNYPVGAPDHISVKQCLLAILILALVATIFFVCTVVLAVRLSRKGHMYPVRNYSPTEMVCISSLLPDGGEGPSATANGGLSKAKSPGLTPEPREDREGDDLTLHSFLP

SEQ ID NO: 152 - protein, 586 aa, Homo sapiens
MKKSYSGGTRTSSGRLRRLGDSSGPALKRSFEVEEVETPNSTPPRRVQTPLLRATVASSTQKFQDLGVKNSEPSARHVDSLSQRSPKASLRRVELSGPKAAEPVSRRTELSIDISSKQVENAGAIGPSRFGLKRAEVLGHKTPEPAPRRTEITIVKPQESAHRRMEPPASKVPEVPTAPATDAAPKRVEIQMPKPAEAPTAPSPAQTLENSEPAPVSQLQSRLEPKPQPPVAEATPRSQEATEAAPSCVGDMADTPRDAGLKQAPASRNEKAPVDFGYVGIDSILEQMRRKAMKQGFEFNIMVVGQSGLGKSTLINTLFKSKISRKSVQPTSEERIPKTIEIKSITHDIEEKGVRMKLTVIDTPGFGDHINNENCWQPIMKFINDQYEKYLQEEVNINRKKRIPDTRVHCCLYFIPATGHSLRPLDIEFMKRLSKVVNIVPVIAKADTLTLEERVHFKQRITADLLSNGIDVYPQKEFDEDSEDRLVNEKFREMIPFAVVGSDHEYQVNGKRILGRKTKWGTIEVENTTHCEFAYLRDLLIRTHMQNIKDITSSIHFEAYRVKRLNEGSSAMANGMEEKEPEAPEM

SEQ ID NO: 153 - protein, 418 aa, Homo sapiens
MPSSVSWGILLLAGLCCLVPVSLAEDPQGDAAQKTDTSHHDQDHPTFNKITPNLAEFAFSLYRQLAHQSNSTNIFFSPVSIATAFAMLSLGTKADTHDEILEGLNFNLTEIPEAQIHEGFQELLRTLNQPDSQLQLTTGNGLFLSEGLKLVDKFLEDVKKLYHSEAFTVNFGDTEEAKKQINDYVEKGTQGKIVDLVKELDRDTVFALVNYIFFKGKWERPFEVKDTEEEDFHVDQVTTVKVPMMKRLGMFNIQHCKKLSSWVLLMKYLGNATAIFFLPDEGKLQHLENELTHDIITKFLENEDRRSASLHLPKLSITGTYDLKSVLGQLGITKVFSNGADLSGVTEEAPLKLSKAVHKAVLTIDEKGTEAAGAMFLEAIPMSIPPEVKFNKPFVFLMIEQNTKSPLFMGKVVNPTQK

SEQ ID NO: 154 - protein, 423 aa, Homo sapiens
MERMLPLLALGLLAAGFCPAVLCHPNSPLDEENLTQENQDRGTHVDLGLASANVDFAFSLYKQLVLKAPDKNVIFSPLSISTALAFLSLGAHNTTLTEILKGLKFNLTETSEAEIHQSFQHLLRTLNQSSDELQLSMGNAMFVKEQLSLLDRFTEDAKRLYGSEAFATDFQDSAAAKKLINDYVKNGTRGKITDLIKDLDSQTMMVLVNYIFFKAKWEMPFDPQDTHQSRFYLSKKKWVMVPMMSLHHLTIPYFRDEELSCTVVELKYTGNASALFILPDQDKMEEVEAMLLPETLKRWRDSLEFREIGELYLPKFSISRDYNLNDILLQLGIEEAFTSKADLSGITGARNLAVSQVVHKAVLDVFEEGTEASAATAVKITLLSALVETRTIVRFNRPFLMIIVPTDTQNIFFMSKVTNPKQA

SEQ ID NO: 155 - protein, 379 aa, Homo sapiens
MEQLSSANTRFALDLFLALSENNPAGNIFISPFSISSAMAMVFLGTRGNTAAQLSKTFHFNTVEEVHSRFQSLNADINKRGASYILKLANRLYGEKTYNFLPEFLVSTQKTYGADLASVDFQHASEDARKTINQWVKGQTEGKIPELLASGMVDNMTKLVLVNAIYFKGNWKDKFMKEATTNAPFRLNKKDRKTVKMMYQKKKFAYGYIEDLKCRVLELPYQGEELSMVILLPDDIEDESTGLKKIEEQLTLEKLHEWTKPENLDFIEVNVSLPRFKLEESYTLNSDLARLGVQDLFNSSKADLSGMSGARDIFISKIVHKSFVEVNEEGTEAAAATAGIATFCMLMPEENFTADHPFLFFIRHNSSGSILFLGRFSSP

SEQ ID NO: 156 - protein, 376 aa, Homo sapiens
MDVLAEANGTFALNLLKTLGKDNSKNVFFSPMSMSCALAMVYMGAKGNTAAQMAQILSFNKSGGGGDIHQGFQSLLTEVNKTGTQYLLRMANRLFGEKSCDFLSSFRDSCQKFYQAEMEELDFISAVEKSRKHINTWVAEKTEGKIAELLSPGSVDPLTRLVLVNAVYFRGNWDEQFDKENTEERLFKVSKNEEKPVQMMFKQSTFKKTYIGEIFTQILVLPYVGKELNMIIMLPDETTDLRTVEKELTYEKFVEWTRLDMMDEEEVEVSLPRFKLEESYDMESVLRNLGMTDAFELGKADFSGMSQTDLSLSKVVHKSFVEVNEEGTEAAAATAAIMMMRCARFVPRFCADHPFLFFIQHSKTNGILFCGRFSSP

SEQ ID NO: 157 - protein, 1217 aa, Homo sapiens
MFLYNLTLQRATGISFAIHGNFSGTKQQEIVVSRGKILELLRPDPNTGKVHTLLTVEVFGVIRSLMAFRLTGGTKDYIVVGSDSGRIVILEYQPSKNMFEKIHQETFGKSGCRRIVPGQFLAVDPKGRAVMISAIEKQKLVYILNRDAAARLTISSPLEAHKANTLVYHVVGVDVGFENPMFACLEMDYEEADNDPTGEAAANTQQTLTFYELDLGLNHVVRKYSEPLEEHGNFLITVPGGSDGPSGVLICSENYITYKNFGDQPDIRCPIPRRRNDLDDPERGMIFVCSATHKTKSMFFFLAQTEQGDIFKITLETDEDMVTEIRLKYFDTVPVAAAMCVLKTGFLFVASEFGNHYLYQIAHLGDDDEEPEFSSAMPLEEGDTFFFQPRPLKNLVLVDELDSLSPILFCQIADLANEDTPQLYVACGRGPRSSLRVLRHGLEVSEMAVSELPGNPNAVWTVRRHIEDEFDAYIIVSFVNATLVLSIGETVEEVTDSGFLGTTPTLSCSLLGDDALVQVYPDGIRHIRADKRVNEWKTPGKKTIVKCAVNQRQVVIALTGGELVYFEMDPSGQLNEYTERKEMSADVVCMSLANVPPGEQRSRFLAVGLVDNTVRIISLDPSDCLQPLSMQALPAQPESLCIVEMGGTEKQDELGERGSIGFLYLNIGLQNGVLLRTVLDPVTGDLSDTRTRYLGSRPVKLFRVRMQGQEAVLAMSSRSWLSYSYQSRFHLTPLSYETLEFASGFASEQCPEGIVAISTNTLRILALEKLGAVFNQVAFPLQYTPRKFVIHPESNNLIIIETDHNAYTEATKAQRKQQMAEEMVEAAGEDERELAAEMAAAFLNENLPESIFGAPKAGNGQWASVIRVMNPIQGNTLDLVQLEQNEAAFSVAVCRFSNTGEDWYVLVGVAKDLILNPRSVAGGFVYTYKLVNNGEKLEFLHKTPVEEVPAAIAPFQGRVLIGVGKLLRVYDLGKKKLLRKCENKHIANYISGIQTIGHRVIVSDVQESFIWVRYKRNENQLIIFADDTYPRWVTTASLLDYDTVAGADKFGNICVVRLPPNTNDEVDEDPTGNKALWDRGLLNGASQKAEVIMNYHVGETVLSLQKTTLIPGGSESLVYTTLSGGIGILVPFTSHEDHDFFQHVEMHLRSEHPPLCGRDHLSFRSYYFPVKNVIDGDLCEQFNSMEPNKQKNVSEELDRTPPEVSKKLEDIRTRYAF

SEQ ID NO: 158 - protein, 163 aa, Homo sapiens
MPSIKLQSSDGEIFEVDVEIAKQSVTIKTMLEDLGMDDEGDDDPVPLPNVNAAILKKVIQWCTHHKDDPPPPEDDENKEKRTDDIPVWDQEFLKVDQGTLFELILAANYLDIKGLLDVTCKTVANMIKGKTPEEIRKTFNIKNDFTEEEEAQVRKENQWCEEK

SEQ ID NO: 159 - protein, 298 aa, Homo sapiens
MTDAAVSFAKDFLAGGVAAAISKTAVAPIERVKLLLQVQHASKQITADKQYKGIIDCVVRIPKEQGVLSFWRGNLANVIRYFPTQALNFAFKDKYKQIFLGGVDKRTQFWLYFAGNLASGGAAGATSLCFVYPLDFARTRLAADVGKAGAEREFRGLGDCLVKIYKSDGIKGLYQGFNVSVQGIIIYRAAYFGIYDTAKGMLPDPKNTHIVISWMIAQTVTAVAGLTSYPFDTVRRRMMMQSGRKGTDIMYTGTLDCWRKIARDEGGKAFFKGAWSNVLRGMGGAFVLVLYDEIKKYT

SEQ ID NO: 160 - protein, 79 aa, Homo sapiens
MKVTGIFLLSALALLSLSGNTGADSLGREAKCYNELNGCTKIYDPVCGTDGNTYPNECVLCFENRKRQTSILIQKSGPC

SEQ ID NO: 161 - protein, 331 aa, Homo sapiens
MENPSPAAALGKALCALLLATLGAAGQPLGGESICSARALAKYSITFTGKWSQTAFPKQYPLFRPPAQWSSLLGAAHSSDYSMWRKNQYVSNGLRDFAERGEAWALMKEIEAAGEALQSVHEVFSAPAVPSGTGQTSAELEVQRRHSLVSFVVRIVPSPDWFVGVDSLDLCDGDRWREQAALDLYPYDAGTDSGFTFSSPNFATIPQDTVTEITSSSPSHPANSFYYPRLKALPPIARVTLVRLRQSPRAFIPPAPVLPSRDNEIVDSASVPETPLDCEVSLWSSWGLCGGHCGRLGTKSRTRYVRVQPANNGSPCPELEEEAECVPDNCV

SEQ ID NO: 162 - protein, 314 aa, Homo sapiens
MRIAVICFCLLGITCAIPVKQADSGSSEEKQLYNKYPDAVATWLNPDPSQKQNLLAPQNAVSSEETNDFKQETLPSKSNESHDHMDDMDDEDDDDHVDSQDSIDSNDSDDVDDTDDSHQSDESHHSDESDELVTDFPTDLPATEVFTPVVPTVDTYDGRGDSVVYGLRSKSKKFRRPDIQYPDATDEDITSHMESEELNGAYKAIPVAQDLNAPSDWDSRGKDSYETSQLDDQSAETHSHKQSRLYKRKANDESNEHSDVIDSQELSKVSREFHSHEFHSHEDMLVVDPKSKEEDKHLKFRISHELDSASSEVN

SEQ ID NO: 163 - protein, 536 aa, Homo sapiens
MGSNKSKPKDASQRRRSLEPAENVHGAGGGAFPASQTPSKPASADGHRGPSAAFAPAAAEPKLFGGFNSSDTVTSPQRAGPLAGGVTTFVALYDYESRTETDLSFKKGERLQIVNNTEGDWWLAHSLSTGQTGYIPSNYVAPSDSIQAEEWYFGKITRRESERLLLNAENPRGTFLVRESETTKGAYCLSVSDFDNAKGLNVKHYKIRKLDSGGFYITSRTQFNSLQQLVAYYSKHADGLCHRLTTVCPTSKPQTQGLAKDAWEIPRESLRLEVKLGQGCFGEVWMGTWNGTTRVAIKTLKPGTMSPEAFLQEAQVMKKLRHEKLVQLYAVVSEEPIYIVTEYMSKGSLLDFLKGETGKYLRLPQLVDMAAQIASGMAYVERMNYVHRDLRAANILVGENLVCKVADFGLARLIEDNEYTARQGAKFPIKWTAPEAALYGRFTIKSDVWSFGILLTELTTKGRVPYPGMVNREVLDQVERGYRMPCPPECPESLHDLMCQCWRKEPEERPTFEYLQAFLEDYFTSTEPQYQPGENL

SEQ ID NO: 164 - protein, 536 aa, Homo sapiens; identical to SEQ ID NO: 163

SEQ ID NO: 165 - protein, 623 aa, Homo sapiens
MATEHVNGNGTEEPMDTTSAVIHSENFQTLLDAGLPQKVAEKLDEIYVAGLVAHSDLDERAIEALKEFNEDGALAVLQQFKDSDLSHVQNKSAFLCGVMKTYRQREKQGTKVADSSKGPDEAKIKALLERTGYTLDVTTGQRKYGGPPPDSVYSGQQPSVGTEIFVGKIPRDLFEDELVPLFEKAGPIWDLRLMMDPLTGLNRGYAFVTFCTKEAAQEAVKLYNNHEIRSGKHIGVCISVANNRLFVGSIPKSKTKEQILEEFSKVTEGLTDVILYHQPDDKKKNRGFCFLEYEDHKTAAQARRRLMSGKVKVWGNVGTVEWADPIEDPDPEVMAKVKVLFVRNLANTVTEEILEKAFSQFGKLERVKKLKDYAFIHFDERDGAVKAMEEMNGKDLEGENIEIVFAKPPDQKRKERKAQRQAAKNQMYDDYYYYGPPHMPPPTRGRGRGGRGGYGYPPDYYGYEDYYDYYGYDYHNYRGGYEDPYYGYEDFQVGARGRGGRGARGAAPSRGRGAAPPRGRAGYSQRGGPGSARGVRGARGGAQQQRGRGVRGARGGRGGNVGGKRKADGYNQPDSKRRQTNNQNWGSQPIAQQPLQGGDHSGNYGYKSENQEFYQDTFGQQWK

SEQ ID NO: 166 - protein, 331 aa, Homo sapiens
MTERPPSEAARSDPQLEGRDAAEASMAPPHLVLLNGVAKETSRAAAAEPPVIELGARGGPGGGPAGGGGAARDLKGRDAATAEARHRVPTTELCRPPGPAPAPAPASVTAELPGDGRMVQLSPPALAAPAAPGRALLYSLSQPLASLGSGFFGEPDAFPMFTTNNRVKRRPSPYEMEITDGPHTKVVRRIFTNSRERWRQQNVNGAFAELRKLIPTHPPDKKLSKNEILRLAMKYINFLAKLLNDQEEEGTQRAKTGKDPVVGAGGGGGGGGGGAPPDDLLQDVLSPNSSCGSSLDGAASPDSYTEEPAPKHTARSLHPAMLPAADGAGPR

SEQ ID NO: 167 - protein, 698 aa, Homo sapiens
MRLAVGALLVCAVLGLCLAVPDKTVRWCAVSEHEATKCQSFRDHMKSVIPSDGPSVACVKKASYLDCIRAIAANEADAVTLDAGLVYDAYLAPNNLKPVVAEFYGSKEDPQTFYYAVAVVKKDSGFQMNQLRGKKSCHTGLGRSAGWNIPIGLLYCDLPEPRKPLEKAVANFFSGSCAPCADGTDFPQLCQLCPGCGCSTLNQYFGYSGAFKCLKDGAGDVAFVKHSTIFENLANKADRDQYELLCLDNTRKPVDEYKDCHLAQVPSHTVVARSMGGKEDLIWELLNQAQEHFGKDKSKEFQLFSSPHGKDLLFKDSAHGFLKVPPRMDAKMYLGYEYVTAIRNLREGTCPEAPTDECKPVKWCALSHHERLKCDEWSVNSVGKIECVSAETTEDCIAKIMNGEADAMSLDGGFVYIAGKCGLVPVLAENYNKSDNCEDTPEAGYFAIAVVKKSASDLTWDNLKGKKSCHTAVGRTAGWNIPMGLLYNKINHCRFDEFFSEGCAPGSKKDSSLCKLCMGSGLNLCEPNNKEGYYGYTGAFRCLVEKGDVAFVKHQTVPQNTGGKNPDPWAKNLNEKDYELLCLDGTRKPVEEYANCHLARAPNHAVVTRKDKEACVHKILRQQQHLFGSNVTDCSGNFCLFRSETKDLLFRDDTVCLAKLHDRNTYEKYLGEEYVKAVGNLRKCSTSSLLEACTFRRP

SEQ ID NO: 168 - protein, 1170 aa, Homo sapiens
MGLAWGLGVLFLMHVCGTNRIPESGGDNSVFDIFELTGAARKGSGRRLVKGPDPSSPAFRIEDANLIPPVPDDKFQDLVDAVRAEKGFLLLASLRQMKKTRGTLLALERKDHSGQVFSVVSNGKAGTLDLSLTVQGKQHVVSVEEALLATGQWKSITLFVQEDRAQLYIDCEKMENAELDVPIQSVFTRDLASIARLRIAKGGVNDNFQGVLQNVRFVFGTTPEDILRNKGCSSSTSVLLTLDNNVVNGSSPAIRTNYIGHKTKDLQAICGISCDELSSMVLELRGLRTIVTTLQDSIRKVTEENKELANELRRPPLCYHNGVQYRNNEEWTVDSCTECHCQNSVTICKKVSCPIMPCSNATVPDGECCPRCWPSDSADDGWSPWSEWTSCSTSCGNGIQQRGRSCDSLNNRCEGSSVQTRTCHIQECDKRFKQDGGWSHWSPWSSCSVTCGDGVITRIRLCNSPSPQMNGKPCEGEARETKACKKDACPINGGWGPWSPWDICSVTCGGGVQKRSRLCNNPTPQFGGKDCVGDVTENQICNKQDCPIDGCLSNPCFAGVKCTSYPDGSWKCGACPPGYSGNGIQCTDVDECKEVPDACFNHNGEHRCENTDPGYNCLPCPPRFTGSQPFGQGVEHATANKQVCKPRNPCTDGTHDCNKNAKCNYLGHYSDPMYRCECKPGYAGNGIICGEDTDLDGWPNENLVCVANATYHCKKDNCPNLPNSGQEDYDKDGIGDACDDDDDNDKIPDDRDNCPFHYNPAQYDYDRDDVGDRCDNCPYNHNPDQADTDNNGEGDACAADIDGDGILNERDNCQYVYNVDQRDTDMDGVGDQCDNCPLEHNPDQLDSDSDRIGDTCDNNQDIDEDGHQNNLDNCPYVPNANQADHDKDGKGDACDHDDDNDGIPDDKDNCRLVPNPDQKDSDGDGRGDACKDDFDHDSVPDIDDICPENVDISETDFRRFQMIPLDPKGTSQNDPNWVVRHQGKELVQTVNCDPGLAVGYDEFNAVDFSGTFFINTERDDDYAGFVFGYQSSSRFYVVMWKQVTQSYWDTNPTRAQGYSGLSVKVVNSTTGPGEHLRNALWHTGNTPGQVRTLWHDPRHIGWKDFTAYRWRLSHRPKTGFIRVVMYEGKKIMADSGPIYDKTYAGGRLGLFVFSQEMVFFSDLKYECRDP

SEQ ID NO: 169 - protein, 207 aa, Homo sapiens
MAPFEPLASGILLLLWLIAPSRACTCVPPHPQTAFCNSDLVIRAKFVGTPEVNQTTLYQRYEIKMTKMYKGFQALGDAADIRFVYTPAMESVCGYFHRSHNRSEEFLIAGKLQDGLLHITTCSFVAPWNSLSLAQRRGFTKTYTVGCEECTVFPCLSIPCKLQSGTHCLWTDQLLQGSEKGFQSRHLACLPREPGLCTWQSLRSQIA

SEQ ID NO: 170 - protein, 623 aa, Homo sapiens
MESYHKPDQQKLQALKDTANRLRISSIQATTAAGSGHPTSCCSAAEIMAVLFFHTMRYKSQDPRNPHNDRFVLSKGHAAPILYAVWAEAGFLAEAELLNLRKISSDLDGHPVPKQAFTDVATGSLGQGLGAACGMAYTGKYFDKASYRVYCLLGDGELSEGSVWEAMAFASIYKLDNLVAILDINRLGQSDPAPLQHQMDIYQKRCEAFGWHAIIVDGHSVEELCKAFGQAKHQPTAIIAKTFKGRGITGVEDKESWHGKPLPKNMAEQIIQEIYSQIQSKKKILATPPQEDAPSVDIANIRMPSLPSYKVGDKIATRKAYGQALAKLGHASDRIIALDGDTKNSTFSEIFKKEHPDRFIECYIAEQNMVSIAVGCATRNRTVPFCSTFAAFFTRAFDQIRMAAISESNINLCGSHCGVSIGEDGPSQMALEDLAMFRSVPTSTVFYPSDGVATEKAVELAANTKGICFIRTSRPENAIIYNNNEDFQVGQAKVVLKSKDDQVTVIGAGVTLHEALAAAELLKKEKINIRVLDPFTIKPLDRKLILDSARATKGRILTVEDHYYEGGIGEAVSSAVVGEPGITVTHLAVNRVPRSGKPAELLKMFGIDRDAIAQAVRGLITKA

SEQ ID NO: 171 - protein, 277 aa, Homo sapiens
MIILIYLFLLLWEDTQGWGFKDGIFHNSIWLERAAGVYHREARSGKYKLTYAEAKAVCEFEGGHLATYKQLEAARKIGFHVCAAGWMAKGRVGYPIVKPGPNCGFGKTGIIDYGIRLNRSERWDAYCYNPHAKECGGVFTDPKQIFKSPGFPNEYEDNQICYWHIRLKYGQRIHLSFLDFDLEDDPGCLADYVEIYDSYDDVHGFVGRYCGDELPDDIISTGNVMTLKFLSDASVTAGGFQIKYVAMDPVSKSSQGKNTSTTSTGNKNFLAGRFSHL

SEQ ID NO: 172 - protein, 440 aa, Homo sapiens
MEQRGQNAPAASGARKRHGPGPREARGARPGPRVPKTLVLVVAAVLLLVSAESALITQQDLAPQQRAAPQQKRSSPSEGLCPPGHHISEDGRDCISCKYGQDYSTHWNDLLFCLRCTRCDSGEVELSPCTTTRNTVCQCEEGTFREEDSPEMCRKCRTGCPRGMVKVGDCTPWSDIECVHKESGTKHSGEVPAVEETVTSSPGTPASPCSLSGIIIGVTVAAVVLIVAVFVCKSLLWKKVLPYLKGICSGGGGDPERVDRSSQRPGAEDNVLNEIVSILQPTQVPEQEMEVQEPAEPTGVNMLSPGESEHLLEPAEAERSQRRRLLVPANEGDPTETLRQCFDDFADLVPFDSWEPLMRKLGLMDNEIKVAKAEAAGHRDTLYTMLIKWVNKTGRDASVHTLLDALETLGERLAKQKIEDHLLSSGKFMYLEGNADSAMS

SEQ ID NO: 173 - protein, 300 aa, Homo sapiens
MRALEGPGLSLLCLVLALPALLPVPAVRGVAETPTYPWRDAETGERLVCAQCPPGTFVQRPCRRDSPTTCGPCPPRHYTQFWNYLERCRYCNVLCGEREEEARACHATHNRACRCRTGFFAHAGFCLEHASCPPGAGVIAPGTPSQNTQCQPCPPGTFSASSSSSEQCQPHRNCTALGLALNVPGSSSHDTLCTSCTGFPLSTRVPGAEECERAVIDFVAFQDISIKRLQRLLQALEAPEGWGPTPRAGRAALQLKLRRRLTELLGAQDGALLVRLLQALRVARMPGLERSVRERFLPVH

SEQ ID NO: 174 - protein, 393 aa, Homo sapiens [sequence omitted]

SEQ ID NO: 175 - protein, 284 aa, Homo sapiens
MDAIKKKMQMLKLDKENAIDRAEQAEADKKQAEDRCKQLEEEQQALQKKLKGTEDEVEKYSESVKEAQEKLEQAEKKATDAEADVASLNRRIQLVEEELDRAQERLATALQKLEEAEKAADESERGMKVIENRAMKDEEKMELQEMQLKEAKHIAEDSDRKYEEVARKLVILEGELERSEERAEVAESKCGDLEEELKIVTNNLKSLEAQADKYSTKEDKYEEEIKLLEEKLKEAETRAEFAERSVAKLEKTIDDLEDEVYAQKMKYKAISEELDNALNDITSL

SEQ ID NO: 176 - protein, 172 aa, Homo sapiens
MIIYRDLISHDEMFSDIYKIREIADGLCLEVEGKMVSRTEGNIDDSLIGGNASAEGPEGEGTESTVITGVDIVMNHHLQETSFTKEAYKKYIKDYMKSIKGKLEEQRPERVKPFMTGAAEQIKHILANFKNYQFFIGENMNPDGMVALLDYREDGVTPYMIFFKDGLEMEKC

SEQ ID NO: 177 - protein, 704 aa, Homo sapiens
MARELRALLLWGRRLRPLLRAPALAAVPGGKPILCPRRTTAQLGPRRNPAWSLQAGRLFSTQTAEDKEEPLHSIISSTESVQGSTSKHEFQAETKKLLDIVARSLYSEKEVFIRELISNASDALEKLRHKLVSDGQALPEMEIHLQTNAEKGTITIQDTGIGMTQEELVSNLGTIARSGSKAFLDALQNQAEASSKIIGQFGVGFYSAFMVADRVEVYSRSAAPGSLGYQWLSDGSGVFEIAEASGVRTGTKIIIHLKSDCKEFSSEARVRDVVTKYSNFVSFPLYLNGRRMNTLQAIWMMDPKDVREWQHEEFYRYVAQAHDKPRYTLHYKTDAPLNIRSIFYVPDMKPSMFDVSRELGSSVALYSRKVLIQTKATDILPKWLRFIRGVVDSEDIPLNLSRELLQESALIRKLRDVLQQRLIKFFIDQSKKDAEKYAKFFEDYGLFMREGIVTATEQEVKEDIAKLLRYESSALPSGQLTSLSEYASRMRAGTRNIYYLCAPNRHLAEHSPYYEAMKKKDTEVLFCFEQFDELTLLHLREFDKKKLISVETDIVVDHYKEEKFEDRSPAAECLSEKETEELMAWMRNVLGSRVTNVKVTLRLDTHPAMVTVLEMGAARHFLRMQQLAKTQEERAQLLQPTLEINPRHALIKKLNQLRASEPGLAQLLVDQIYENAMIAAGLVDDPRAMVGRLNELLVKALERH

SEQ ID NO: 178 - protein, 297 aa, Homo sapiens
MVHQVLYRALVSTKWLAESIRTGKLGPGLRVLDASWYSPGTREARKEYLERHVPGASFFDIEECRDTASPYEMMLPSEAGFAEYVGRLGISNHTHVVVYDGEHLGSFYAPRVWWMFRVFGHRTVSVLNGGFRNWLKEGHPVTSEPSRPEPAVFKATLDRSLLKTYEQVLENLESKRFQLVDSRSQGRFLGTEPEPDAVGLDSGHIRGAVNMPFMDFLTEDGFEKGPEELRALFQTKKVDLSQPLIATCRKGVTACHVALAAYLCGKPDVAVYDGSWSEWFRRAPPESRVSQGKSEKA

SEQ ID NO: 179 - protein, 451 aa, Homo sapiens
MREIVHIQIGQCGNQIGAKFWEMIGEEHGIDLAGSDRGASALQLERISVYYNEAYGRKYVPRAVLVDLEPGTMDSIRSSKLGALFQPDSFVHGNSGAGNNWAKGHYTEGAELIENVLEVVRHESESCDCLQGFQIVHSLGGGTGSGMGTLLMNKIREEYPDRIMNSFSVMPSPKVSDTVVEPYNAVLSIHQLIENADACFCIDNEALYDICFRTLKLTTPTYGDLNHLVSLTMSGITTSLRFPGQLNADLRKLAVNMVPFPRLHFFMPGFAPLTAQGSQQYRALSVAELTQQMFDARNTMAACDLRRGRYLTVACIFRGKMSTKEVDQQLLSVQTRNSSCFVEWIPNNVKVAVCDIPPRGLSMAATFIGNNTAIQEIFNRVSEHFSAMFKRKAFVHWYTSEGMDINEFGEAENNIHDLVSEYQQFQDAKAVLEEDEEVTEEAEMEPEDKGH

SEQ ID NO: 180 - protein, 494 aa, Homo sapiens
MFEIKKICCIGAGYVGGPTCSVIAHMCPEIRVTVVDVNESRINAWNSPTLPIYEPGLKEVVESCRGKNLFFSTNIDDAIKEADLVFISVNTPTKTYGMGKGRAADLKYIEACARRIVQNSNGYKIVTEKSTVPVRAAESIRRIFDANTKPNLNLQVLSNPEFLAEGTAIKDLKNPDRVLIGGDETPEGQRAVQALCAVYEHWVPREKILTTNTWSSELSKLAANAFLAQRISSINSISALCEATGADVEEVATAIGMDQRIGNKFLKASVGFGGSCFQKDVLNLVYLCEALNLPEVARYWQQVIDMNDYQRRRFASRIIDSLFNTVTDKKIAILGFAFKKDTGDTRESSSIYISKYLMDEGAHLHIYDPKVPREQIVVDLSHPGVSEDDQVSRLVTISKDPYEACDGAHAVVICTEWDMFKELDYERIHKKMLKPAFIFDGRRVLDGLHNELQTIGFQIETIGKKVSSKRIPYAPSGEIPKFSLQDPPNKKPKV

SEQ ID NO: 181 - protein, 508 aa, Homo sapiens
MSRFVQDLSKAMSQDGASQFQEVIRQELELSVKKELEKILTTASSHEFEHTKKDLDGFRKLFHRFLQEKGPSVDWGKIQRPPEDSIQPYEKIKARGLPDNISSVLNKLVVVKLNGGLGTSMGCKGPKSLIGVRNENTFLDLTVQQIEHLNKTYNTDVPLVLMNSFNTDEDTKKILQKYNHCRVKIYTFNQSRYPRINKESLLPVAKDVSYSGENTEAWYPPGHGDIYASFYNSGLLDTFIGEGKEYIFVSNIDNLGATVDLYILNHLMNPPNGKRCEFVMEVTNKTRADVKGGTLTQYEGKLRLVEIAQVPKAHVDEFKSVSKFKIFNTNNLWISLAAVKRLQEQNAIDMEIIVNAKTLDGGLNVIQLETAVGAAIKSFENSLGINVPRSRFLPVKTTSDLLLVMSNLYSLNAGSLTMSEKREFPTVPLVKLGSSFTKVQDYLRRFESIPDMLELDHLTVSGDVTFGKNVSLKGTVIIIANHGDRIDIPPGAVLENKIVSGNLRILDH

SEQ ID NO: 182 - protein, 232 aa, Homo sapiens
MNFLLSWVHWSLALLLYLHHAKWSQAAPMAEGGGQNHHEVVKFMDVYQRSYCHPIETLVDIFQEYPDEIEYIFKPSCVPLMRCGGCCNDEGLECVPTEESNITMQIMRIKPHQGQHIGEMSFLQHNKCECRPKKDRARQEKKSVRGKGKGQKRKRKKSRYKSWSVYVGARCCLMPWSLPGPHPCGPCSERRKHLFVQDPQTCKCSCKNTDSRCKARQLELNERTCRCDKPRR

SEQ ID NO: 183 - protein, 827 aa, Homo sapiens
MTKLSAQVKGSLNITTPGLQIWRIEAMQMVPVPSSTFGSFFDGDCYIILAIHKTASSLSYDIHYWIGQDSSLDEQGAAAIYTTQMDDFLKGRAVQHREVQGNESEAFRGYFKQGLVIRKGGVASGMKHVETNSYDVQRLLHVKGKRNVVAGEVEMSWKSFNRGDVFLLDLGKLIIQWNGPESTRMERLRGMTLAKEIRDQERGGRTYVGVVDGENELASPKLMEVMNHVLGKRRELKAAVPDTVVEPALKAALKLYHVSDSEGNLVVREVATRPLTQDLLSHEDCYILDQGGLKIYVWKGKKANEQEKKGAMSHALNFIKAKQYPPSTQVEVQNDGAESAVFQQLFQKWTASNRTSGLGKTHTVGSVAKVEQVKFDATSMHVKPQVAAQQKMVDDGSGEVQVWRIENLELVPVDSKWLGHFYGGDCYLLLYTYLIGEKQHYLLYVWQGSQASQDEITASAYQAVILDQKYNGEPVQIRVPMGKEPPHLMSIFKGRMVVYQGGTSRTNNLETGPSTRLFQVQGTGANNTKAFEVPARANFLNSNDVFVLKTQSCCYLWCGKGCSGDEREMAKMVADTISRTEKQVVVEGQEPANFWMALGGKAPYANTKRLQEENLVITPRLFECSNKTGRFLATEIPDFNQDDLEEDDVFLLDVWDQVFFWIGKHANEEEKKAAATTAQEYLKTHPSGRDPETPIIVVKQGHEPPTFTGWFLAWDPFKWSNTKSYEDLKAELGNSRDWSQITAEVTSPKVDVFNANSNLSSGPLPIFPLEQLVNKPVEELPEGVDPSRKEEHLSIEDFTQAFGMTPAAFSALPRWKQQNLKKEKGLF

SEQ ID NO: 184 - protein, 466 aa, Homo sapiens
MSTRSVSSSSYRRMFGGPGTASRPSSSRSYVTTSTRTYSLGSALRPSTSRSLYASSPGGVYATRSSAVRLRSSVPGVRLLQDSVDFSLADAINTEFKNTRTNEKVELQELNDRFANYIDKVRFLEQQNKILLAELEQLKGQGKSRLGDLYEEEMRELRRQVDQLTNDKARVEVERDNLAEDIMRLREKLQEEMLQREEAENTLQSFRQDVDNASLARLDLERKVESLQEEIAFLKKLHEEEIQELQAQIQEQHVQIDVDVSKPDLTAALRDVRQQYESVAAKNLQEAEEWYKSKFADLSEAANRNNDALRQAKQESTEYRRQVQSLTCEVDALKGTNESLERQMREMEENFAVEAANYQDTIGRLQDEIQNMKEEMARHLREYQDLLNVKMALDIEIATYRKLLEGEESRISLPLPNFSSLNLRETNLDSLPLVDTHSKRTLLIKTVETRDGQVINETSQHHDDLE

SEQ ID NO: 185 - protein, 513 aa, Homo sapiens
MTTQLPAYVAILLFYVSRASCQDTFTAAVYEHAAILPNATLTPVSREEALALMNRNLDILEGAITSAADQGAHIIVTPEDAIYGWNFNRDSLYPYLEDIPDPEVNWIPCNNRNRFGQTPVQERLSCLAKNNSIYVVANIGDKKPCDTSDPQCPPDGRYQYNTDVVFDSQGKLVARYHKQNLFMGENQFNVPKEPEIVTFNTTFGSFGIFTCFDILFHDPAVTLVKDFHVDTIVFPTAWMNVLPHLSAVEFHSAWAMGMRVNFLASNIHYPSKKMTGSGIYAPNSSRAFHYDMKTEEGKLLLSQLDSHPSHSAVVNWTSYASSIEALSSGNKEFKGTVFFDEFTFVKLTGVAGNYTVCQKDLCCHLSYKMSENIPNEVYALGAFDGLHTVEGRYYLQICTLLKCKTTNLNTCGDSAETASTRFEMFSLSGTFGTQYVFPEVLLSENQLAPGEFQVSTDGRLFSLKPTSGPVLTVTLFGRLYEKDWASNASSGLTAQARIIMLIVIAPIVCSLSW

SEQ ID NO: 186 - protein, 245 aa, Homo sapiens
MDKNELVQKAKLAEQAERYDDMAACMKSVTEQGAELSNEERNLLSVAYKNVVGARRSSWRVVSSIEQKTEGAEKKQQMAREYREKIETELRDICNDVLSLLEKFLIPNASQAESKVFYLKMKGDYYRYLAEVAAGDDKKGIVDQSQQAYQEAFEISKKEMQPTHPIRLGLALNFSVFYYEILNSPEKACSLAKTAFDEAIAELDTLSEESYKDSTLIMQLLRDNLTLWTSDTQGDEAEAGEGGEN

SEQ ID NO: 187 - protein, 352 aa, Homo sapiens [sequence omitted]

SEQ ID NO: 188 - protein, 467 aa, Homo sapiens
MRPQELPRLAFPLLLLLLLLLPPPPCPAHSATRFDPTWESLDARQLPAWFDQAKFGIFIHWGVFSVPSFGSEWFWWYWQKEKIPKYVEFMKDNYPPSFKYEDFGPLFTAKFFNANQWADIFQASGAKYIVLTSKHHEGFTLWGSEYSWNWNAIDEGPKRDIVKELEVAIRNRTDLRFGLYYSLFEWFHPLFLEDESSSFHKRQFPVSKTLPELYELVNNYQPEVLWSDGDGGAPDQYWNSTGFLAWLYNESPVRGTVVTNDRWGAGSICKHGGFYTCSDRYNPGHLLPHKWENCMTIDKLSWGYRREAGISDYLTIEELVKQLVETVSCGGNLLMNIGPTLDGTISVVFEERLRQMGSWLKVNGEAIYETHTWRSQNDTVTPDVWYTSKPKEKLVYAIFLKWPTSGQLFLGHPKAILGATEVKLLGHGQPLNWISLEQNGIMVELPQLTIHQMPCKWGWALALTNVI

What is claimed is:

1-10. (canceled)

11. A method of detecting the presence or absence of an adenoma or polyp of the colon in a subject with a sensitivity of greater than 70% or a selectivity of greater than 70%:
(a) obtaining a biological sample from said subject;
(b) performing an analysis of the biological sample for the presence and amount of one or more peptides;
(c) comparing the presence and amount of one or more peptides from said biological sample to a control reference value to determine a positive or negative score for the presence of an adenoma or polyp of the colon with a sensitivity of greater than 70% or a selectivity of greater than 70%.

12. The method of claim 11, wherein said method achieves a sensitivity or selectivity greater than 80%, greater than 85%, greater than 90%, greater than 95%, and greater than 99%.

13-14. (canceled)

15. The method of claim 11, further comprising preparing a report for said subject, wherein said report indicates the presence or absence of an adenoma or polyp.

16. (canceled)

17. The method of claim 11, wherein said method detects the presence or absence of an adenoma.

18. The method of claim 17, wherein said adenoma is an adenomatous polyp or polypoid adenoma.

19. The method of claim 18, wherein said adenomatous polyp or polypoid adenoma is selected from the group of pedunculated polyps and sessile polyps.

20. The method of claim 18, wherein said adenomatous polyp or polypoid adenoma is characterized according to a degree of cell dysplasia or pre-malignancy.

21. The method of claim 11, wherein said method further detects the presence or absence of colorectal carcinoma.

22-23. (canceled)

24. The method of claim 11, further comprising confirming said presence or absence of the adenoma or polyp of the colon by means selected from the group consisting of colonoscopy, imaging, and surgery.

25. The method of claim 11, wherein said biological sample is selected from the group consisting of whole blood, serum, plasma, blood constituent, bone marrow, saliva, cheek swab, urine, stool, lymph fluid, CNS fluid, and lesion exudate.

26. The method of claim 25, wherein said biological sample is selected from the group consisting of whole blood, serum, and plasma.

27. The method of claim 11, wherein said subject is asymptomatic.

28. The method of claim 11, wherein said subject is from 18 to 49 years old.

29. The method of claim 11, wherein said subject has not previously received a colonoscopy.

30. The method of claim 11, wherein said subject has no symptoms for colorectal carcinoma, no family history for colorectal carcinoma, and no recognized risk factors for colorectal carcinoma.

31. (canceled)

32. The method of claim 11, wherein said analysis of step (b) comprises performing one or more of a spectroscopic analysis, mass spectrometry, immunological analysis, and enzymatic reactivity analysis of said one or more peptides.

33. The method of claim 32, wherein said analysis comprises performing a mass spectrometry analysis of said one or more peptides.

34. The method of claim 32, wherein said immunological analysis comprises one or more of an enzyme-linked immunosorbent assay, radioimmunoassay, immunoblotting, immunodiffusion, immunoelectrophoresis, flow cytometry, and immunoprecipitation.

35-36. (canceled)

37. The method of claim 11, wherein said control reference is the presence and amount of a set of one or more non-overlapping proteins and/or peptides in the same biological sample.

38. The method of claim 11, wherein said control reference is the presence and amount of an overlapping set of proteins and/or peptides obtained from one or more subjects in which adenoma or polyp of the colon is present.

39. The method of claim 11, wherein said control reference is the presence and amount of an overlapping set of proteins and/or peptides obtained from one or more subjects in which adenoma or polyp of the colon is not present.

40. The method of claim 11, wherein said analysis detects the presence and amount of a number of proteins or polypeptides, wherein said number is selected from at least 2, at least 5, at least 10, at least 50, at least 100, and at least 1000.

41. The method of claim 11, wherein said one or more peptides comprises one or more of:
i) one or more proteins selected from the group consisting of SCDC26 (CD26), CEA molecule 5 (CEACAM5), CA195 (CCR5), CA19-9, M2PK (PKM2), TIMP1, P-selectin (SELPLG), VEGFA, HcGB (CGB), VILLIN, TATI (SPINK1), A-L-fucosidase (FUCA2), ANXA5, GAPDH, PKM2, ANXA4, GARS, RRBP1, KRT8, SYNCRIP, S100A9, ANXA3, CAPG, HNRNPF, PPA1, NME1, PSME3, AHCY, TPT1, HSPB1, and RPSA, and the proteins in FIG. 9;
ii) one or more peptide fragments of SCDC26 (CD26), CEA molecule 5 (CEACAM5), CA195 (CCR5), CA19-9, M2PK (PKM2), TIMP1, P-selectin (SELPLG), VEGFA, HcGB (CGB), VILLIN, TATI (SPINK1), A-L-fucosidase (FUCA2), ANXA5, GAPDH, PKM2, ANXA4, GARS, RRBP1, KRT8, SYNCRIP, S100A9, ANXA3, CAPG, HNRNPF, PPA1, NME1, PSME3, AHCY, TPT1, HSPB1, and RPSA, or the proteins in FIG. 9;
iii) one or more peptides with a sequence homology to SCDC26 (CD26), CEA molecule 5 (CEACAM5), CA195 (CCR5), CA19-9, M2PK (PKM2), TIMP1, P-selectin (SELPLG), VEGFA, HcGB (CGB), VILLIN, TATI (SPINK1), A-L-fucosidase (FUCA2), ANXA5, GAPDH, PKM2, ANXA4, GARS, RRBP1, KRT8, SYNCRIP, S100A9, ANXA3, CAPG, HNRNPF, PPA1, NME1, PSME3, AHCY, TPT1, HSPB1, and RPSA, or the proteins in FIG. 9, wherein said sequence homology is selected from the group of greater than 75%, greater than 80%, greater than 85%, greater than 90%, greater than 95%, and greater than 99%; and
iv) one or more binding partners of SCDC26 (CD26), CEA molecule 5 (CEACAM5), CA195 (CCR5), CA19-9, M2PK (PKM2), TIMP1, P-selectin (SELPLG), VEGFA, HcGB (CGB), VILLIN, TATI (SPINK1), A-L-fucosidase (FUCA2), ANXA5, GAPDH, PKM2, ANXA4, GARS, RRBP1, KRT8, SYNCRIP, S100A9, ANXA3, CAPG, HNRNPF, PPA1, NME1, PSME3, AHCY, TPT1, HSPB1, and RPSA, or the proteins in FIG. 9.

42-47. (canceled)

48. The method of claim 11, further comprising
(e) performing an analysis of the biological sample for the presence and amount of one or more analytes selected from the groups consisting of metabolites, DNA sequences, RNA sequences, and combinations thereof; and
(f) comparing the presence and amount of said analytes to a control reference value; and
(g) correlating the presence and amount of said analytes with the subject's adenoma or polyp status.

49. The method of claim 11, wherein the subject has previously undergone a colonoscopy which yielded a negative result.

50-85. (canceled)

86. The method of claim 11, wherein the subject has been previously treated for adenoma or polyps of the colon.

87-129. (canceled)

130. A kit, comprising:
(a) a container for collecting a sample from a subject;
(b) means for detecting one or more proteins or peptides, or means for transferring said container to a test facility; and
(c) written instructions for performing the method of claim 11.

131. The kit of claim 130, wherein said means for detecting one or more proteins or peptides comprises one or more antibodies that bind one or more of the following sets:
i) one or more proteins selected from the group consisting of SCDC26 (CD26), CEA molecule 5 (CEACAM5), CA195 (CCR5), CA19-9, M2PK (PKM2), TIMP1, P-selectin (SELPLG), VEGFA, HcGB (CGB), VILLIN, TATI (SPINK1), A-L-fucosidase (FUCA2), ANXA5, GAPDH, PKM2, ANXA4, GARS, RRBP1, KRT8, SYNCRIP, S100A9, ANXA3, CAPG, HNRNPF, PPA1, NME1, PSME3, AHCY, TPT1, HSPB1, and RPSA, and the proteins in FIG. 9;
ii) one or more peptide fragments of SCDC26 (CD26), CEA molecule 5 (CEACAM5), CA195 (CCR5), CA19-9, M2PK (PKM2), TIMP1, P-selectin (SELPLG), VEGFA, HcGB (CGB), VILLIN, TATI (SPINK1), A-L-fucosidase (FUCA2), and ANXA5, GAPDH, PKM2, ANXA4, GARS, RRBP1, KRT8, SYNCRIP, S100A9, ANXA3, CAPG, HNRNPF, PPA1, NME1, PSME3, AHCY, TPT1, HSPB1, and RPSA, and/or the proteins in FIG. 9;
iii) one or more peptides with a sequence homology to SCDC26 (CD26), CEA molecule 5 (CEACAM5), CA195 (CCR5), CA19-9, M2PK (PKM2), TIMP1, P-selectin (SELPLG), VEGFA, HcGB (CGB), VILLIN, TATI (SPINK1), A-L-fucosidase (FUCA2), ANXA5, GAPDH, PKM2, ANXA4, GARS, RRBP1, KRT8, SYNCRIP, S100A9, ANXA3, CAPG, HNRNPF, PPA1, NME1, PSME3, AHCY, TPT1, HSPB1, and RPSA, or the proteins in FIG. 9, wherein said sequence homology is selected from the group of greater than 75%, greater than 80%, greater than 85%, greater than 90%, greater than 95%, and greater than 99%;
iv) one or more binding partners of SCDC26 (CD26), CEA molecule 5 (CEACAM5), CA195 (CCR5), CA19-9, M2PK (PKM2), TIMP1, P-selectin (SELPLG), VEGFA, HcGB (CGB), VILLIN, TATI (SPINK1), A-L-fucosidase (FUCA2), ANXA5, GAPDH, PKM2, ANXA4, GARS, RRBP1, KRT8, SYNCRIP, S100A9, ANXA3, CAPG, HNRNPF, PPA1, NME1, PSME3, AHCY, TPT1, HSPB1, and RPSA, or the proteins in FIG. 9; and
v) a protein or peptide from which one or more neutral mass clusters from FIG. 7 or FIG. 8 is derived.

132. The kit of claim 131, wherein one or more antibodies are each tagged with a label.

133. The kit of claim 132, wherein the label is selected from the group consisting of a radioactive label, a fluorescent label, an enzyme, a chemiluminescent tag, and combinations thereof.

134. The kit of claim 131, wherein the antibodies are packaged in an aqueous medium or in lyophilized form.

135. The kit of claim 130, wherein said means for detecting one or more proteins or peptides comprises an enzyme-linked immunosorbent assay.

136. The method of claim 11, wherein the one or more peptides is selected from the group consisting of ACTB, ACTH, ANGT, SAHH, ALDR, AKT1, ALBU, AL1A1, AL1B1, ALDOA, AMY2B, ANXA1, ANXA3, ANXA4, ANXA5, APC, APOA1, APOC1, APOH, GDIR1, ATPB, BANK1, MIC1, CA195, CO3, CO9, CAH1, CAH2, CALR, CAPG, CD24, CD63, CDD, CEAM3, CEAM5, CEAM6 CGHB, CH3L1, KCRB, CLC4D, CLUS, CNN1, COR1C, CRP, CSF1, CTNB1, CATD, CATS, CATZ, CUL1, SYDC, DEF1, DEF3, DESM, DPP4, DPYL2, DYHC1, ECH1, EF2, IF4A3, ENOA EZR1, NIBL2, SEPR, FBX4, FIBB, FIBG, FHL1, FLNA, FRMD3, FRIH, FRIL, FUCO, GBRA1, G3P, SYG, GDF15, GELS, GSTP1, HABP2, HGF, 1A68, HMGB1, ROA1, ROA2, HNRPF, HPT, HS90B, ENPL, GRP75, HSPB1, CH60, SIAL, IFT74, IGF1, IGHA2, IL2RB, IL8, IL9, RASK, K1C19, K2C8, LAMA2, LEG3, LMNB1, MARE1, MCM4, MIF, MMP7, MMP9, CD20, MYL6, MYL9, NDKA, NNMT, A1AG1, PCKGM, PDIA3, PDIA6, PDXK, PEBP1, PIPNA, KPYM, UROK, IPYR, PRDX1, KPCD1, PRL, TMG4, PSME3, PTEN, FAK1, FAK2, RBX1, REG4, RHOA, RHOB, RHOC, RSSA, RRBP1, S10AB, S10AC, 510A8, 5109, SAA1, SAA2, SEGN, SDCG3, DHSA, SBP1, SELPL, SEP9, A1AT, AACT, ILEU, SPB6, SF3B3, SKP1, ADT2, ISK1, SPON2, OSTP, SRC, STK11, HNRPQ, TAL1, TRFE, TSP1, TIMP1, TKT, TSG6, TR10B, TNF6B, P53, TPM2, TCTP, TRAP1, THTR, TBB1, UGDH, UGPA, VEGFA, VILI, VIME, VNN1, 1433Z, CCR5, FUCO, and combinations thereof in a biological sample from the subject.

137. The method of claim 136, wherein the one or more peptides is selected from the group consisting of SPB6, FRIL, P53, 1A68, ENOA, TKT.

138. The method of claim 136, wherein the one or more peptides is selected from the group consisting of SPB6, FRIL, P53, 1A68, ENOA, TKT, TSG6, TPM2, ADT2, FHL1, CCR5, CEAM5, SPON2, 1A68, RBX1, COR1C, VIME, PSME3, and combinations thereof in a biological sample from the subject.

139. The method of claim 136, wherein the one or more peptides is selected from the group consisting of SPB6, FRIL, P53, 1A68, ENOA, TKT, TSG6, TPM2, ADT2, FHL1, CCR5, CEAM5, SPON2, 1A68, RBX1, COR1C, VIME, PSME3, MIC1, STK11, IPYR, SBP1, PEBP1, CATD, HPT, ANXA5, ALDOA, LAMA2, CATZ, ACTB, AACT, and combinations thereof in a biological sample from the subject.
